United States Patent Application Publication US 2015/0354009 A1 - sequence listing, part 6

SEQ ID NO: 139 - DNA, 221644 bp, Homo sapiens
caccaagcgcagccgccgctgccgcactttccacttgtattgatcacctctcagccccgcgcagccggctcgcccgagcggaccgcggccagcgcgccagcccttggcagccccggagcagtcgggctccgggaggaaactccttgggagcgccctgtccggggtgccctctgcgctctgcagtgtctttctttctgcctgggaggaggaggaggaggaggaagaggaggaggaggaggaggaggaggaggaagaggaggaggaggaggaggacgtctggtcccggctgggaggtggagcagcggcagcagcagcagccgccgccgccgccgccgctgccgccgccgccggaaagggagaggcaggagagcccgagacttggaaaccccaaagtgtccgcgaccctgcacggcaggctcccttccagcttcatgggcaaagtgtggaaacagcagatgtaccctcagtacgccacctactattacccccagtatctgcaagccaaggtaaaggggcgccggggagaggtgacggccggaggagggggcccggggacgcgcgcagggtcaggcctggggaggggggcgcgcggcgaacccccgccaccgccgggcggagttgctggaaggttgctaactatagcgctggcctgggcagagccgggcggcgcgcggggcggcggcttccctgggagcggagtgcggggatcgggttacagaaagccgcggggggagagactagacaggaaagagccaccagccccttcctggcccggccagcggggagggtcgtggggtcgagcggcgcccctcgccgagccctggctggccggcggccgtcgcctggtgtgcgcgtctggatccgctggtggcccggcttttcgaccccttctccaagggcctcgccctgtaagctgtaactcttcgctcccctcgccgtggcgcggagcctcccgccccccagggacgcccctccacctcccgcgcacgcgatgactggggctggaggggcggcggggccgggatattttcctccccgcctccggccctgagcgcccgcccctcgcctctgatctttgtgcggtgtggcacttcacctggttactgatttctacttttacgctggtgttttgggtagaaaagtggccaaagttcactcgcgttcattgatgtcccttctaatctctagaggttttgcaaaggagggacaatgggcagatttcagtgcagagaaagaagtgacttcgtatttggttaaaaaagaaacaaaaacaaaactagcttatatgtttgccacagatcgatttccaatgttgctttttaaaaagtgacctcggcacactcttgggtaacaacagttgatgacatgtagccatacaaattgcgcctggctttctagggaccctgggtactttgttagtgggcctatcttatttttacaataagaatttgatgcctcccgaactcatttaaaaaaattatttgggccatgaagactggaaatttcactgctttggaagcagccgccagaatttgggagggtggaagttggacgcagcagccttcttcagccattaacatctatcacaactctgggtgcccttctagatcacaaaagaatcaggtatggatgcagtgtccgaactttctttgggaggttgtaatcatgctctgcttgctggtagttgggcatttccggcctggtacaaagaatctctgattcagccttttctttcttagaatgtgtgtggtccacgttttcatgtacttacgacatagccctgtatttgtctacgtaaaaaggacacttgtcagtttcgagaccagaaatgtcctagcaatcccgggcctcattttcacttcccccaattcccactttactttgggtcaccagaaagcagcaagatggtagcagcaaggataccccttattcatctctgtgtagttctcacagtatttgttttaggaacttgcaggagatgctagttttctgtgagctacatggtagctgttcaaagaaattttgtggcataatcaatgcactaccttttagatatcttatatatttaatgcacttgtttaaattatgcagcattgggtgcctaaaggacagcttattcaacacttaacaatatgaataataaatacacccactcaggtgaggaagaaaaaaagccatgtttctacaggcacatttaccttagtaatttttatataccattagtaagttagaaaccaagtccataccatttaatgtagctaatgcaatgccatttggcttttttgccctgtaaataattgaagagagagacaaacggcaagagcctgctctagtaattagggtcggatcccagaaagctttacggcccattttctgaaagtgtgcttcctgcataaagcatttaatattgatttgtgttgcggtaaatgacattctcaaaacattttgctaattctacaattaaatctgaaatcctattattcggaattcctttgtttctggagaaaggtatacatactcacttgacctatataacatggtattaaagtttggtaattaagtctaaattccctgttgtacaagtatcttgattatctcagaaggggacatcttctaaaaatggcacgtgactagatgcaaattttaggtaagcagagttcggaacaggcagcccttttttttttctctcccttatgtatctgttggtagcatggtagtaatgttgaatcatttaaaaaaaaaaagactttgatttgtagttagtttaaaaacaagtgttgcctaatctacctaaagagttaataaactctcttaggatctgctgtctgtcatgattcttgcctctgtgtgtgctttaaccttccgaaaatatgggatagaaaacatcactctgtttaaagtacagtgatgtgtttgctaggcagagtcattttgaaacttctgtttggaagctatatcaaaaactgaagaatggcatggtcatctaaaaagtgatagctaatttgtactcaagagatagatgtgattttctcaaatctaattcttttaatcagaaggaacagataataccaggtaaaatggaacttaacagtttgttttgttaccatacttttaaaagttatatatgccaaaccattcttcttgttttagtgatccagtctattttggtaaacttattttgtaattttccccataaaaacatactagttacttccacattttattaataaaaaaataccatccgttgggctatattggagcaaatgaccatattggtatgctttgtactttgacagaaagaaaaaaaatcattagaaaaagtaatatgtctccatgaaatgtaaaataaacttgagtgtactatggaagagcaggacatgagtggaaatgaatgagattgtataatattcataataccttggtgtagagttacataaatttcaagtaacctgatttcacatgctgttggttttttgttttttttttttatttctcagtgaggatggtcttatcacagcaggttctttttatcagctgacacattcattctgaaatgtagcttgatgtagctttataaacataaccacatattgtcctaaataattttctcaattttaaaatgacctatgctgtattatattaaatttaatatccatcttttagctacacagaaaaaagatgttgataatctaacatattttaacttaaagatttgtatgtacacattttcaaccagtggctgcattaatttcacttattgtaaaagcaacccttgaattatggtctgtttatttcaaagatactacaacatacattattgccagtgcatgtatgtaaatagttatggggattgaaatattctgtttcttttgaagaaagggaagtacaaaattttctttccatgattagttagctacatattttgtaccaactgaaagcaatttgggacagttgtaatctttattcacatagttctaagaatatatttctataaaattaatggaaagcttgatttttttaagtttttgtgtatgaagaagtattgttttccatgctgaagaaatgtctatacgaaagatacgtttctttctaaaacaaaacaattttgtttttacgccatttttacatacgcttatgacacagaatatatctgaacctagcttcagaatctgaaaataataaatgatataatttattctattaataaaggctagtagaacaaagcagtttttctgcattgaacttttgcatgcattttttattgaattccttaactcttacttacttctagccaaatgaatattgtatcaatctgtttctccagaaattagtagtcctgatttgatacataaaactgttgcatctaatgaagtggaagtacacaggcataatattcagacatggggcgctttgtgtcataagaagtaaccacatttatgatgtaaataaagtttgcttaaaatatgtcagtttggtaatgcagtattttacactgatgaatcaaccttatttccttaagtgagtggggtattatgtatgactatctggaagtggtattgaaaggctgaaggacatgtaactattaaaatgaagatgcattacaatgcaacagtgtagcacccttctcttccaacagctatttcttttgaatttcccatacaactttttgttttttcccctatgttgggagccaaatcttaagttccttgaagggaaaaggaaaagataggtgagctaggaaagtattcagtcatttagtatcagtataactacatacaccttacatcttaggcaatcttggctttgagtttaaattcaaatgtggggaatttccatgtaatatacattcaagaaaagaatttttactaatatattgctctgactttgtatttttaatagtttattgaaaccatttcggcatctagcttttaaattgagacagtaaagttttatcctatttattggaatattatagaaataatagaatattatagaaataggagtatgtcaagttactctcaagtggaagtgttttatgcaatctaaaatagcttattttaaagaaatgtagtaatgacctgtcagttgttcaaatgcagcaccataacatttggtataaaaccaaaccaaatattcaaaagttgaacatcggcttggggattttatgtgggatgaatttaaatgttctgtttcctctgctgttttatttatttatttttgagatggagtcttgctctgttgcccaggctggagtgtggtggcacgatctcggctcactacaacctctgcctcccaggttcaagcaattctcctgccacagcctcccaagtagctaggactacaggcgcgtgccacaattcctccctaatttttgtattttcagtagagacggggtttcactacgttggccaggctggtcttgaactccggacctcgtgatccgccgcctcagcctcctttcaaagtgctgggattacaggcatgagccactgcgcccagcctctgctgttttattttaatgaataaataatgaaacctgatggaactcagctgtgcctcatgagaggcagcaatgggacgatggaggtctaccataggtagtttggttaggtgatacagagcaaaatgtaattttagaacaaatggtgtgtgttgaacacacacacacaaatttgagtacatatgcaaatttgataatagaaacaaagcatttcttagtctggtagatatgaggtcaatagaagagtgtagagaggatggtaacagctaagccaaccacaaactgaacatatatctcccataatctaattcctcaatgcatctagtctccttaacaaaattatgtgaatattttaatttttcaaacaagccctggaaaataagcatgtcaaaatgatgagagaaaaacaaaaaggagagagaaaaaatcaacatctgaacctcctaggggagaaaagtgtataaaattaagcattgttattctctccccatgttgtctcttaactaattcttaaatggatgcattttagaagattgagaatatgttggacattgaatatgaaaacctagattctaaaagtgaggttggatgctgatatgaacagttagcttgcatgtagatctggcactgtaaacatgctaaatcaatgttggtgggtgatttcctacattcactataatatctgtgttttggattaggtaaagatttaagctggtagttgttgtaaaattgctgaggctcatgatgaaggactaaaacactagccaatcaattgtatttactgagtgaccccagtacatcattctttgcacttgacattgggaaagtttaaagagttgaatatctggtacctgctctccagcacctcacaagctaccagggaggacagaatagacacaaggcaagaaataagcacagaatatttacaaagtagtgcacccacgaaagcagcacaccagctgatgtcctgggttttagtgactgagaaggcactaagatatatgtaggattaaacactttgccatgtcttttgcaagaaagtgaaaagtgctaataaaagctacaataaatctgggaattttagaaagacataaggctttaaatgaataaatgaatttttttacttaccagcattgttttgcattttttctgctgtataaattcttttaagagtacttagaattttaaacgaataatttttttgtactttatgttaacttctccttaaagtttcatattcaattaatttatttcaccctattatttttctagttttatgcttacaaatgtgctgttaagccaacctattagaggtgtggcaggttggaaatgtactccttaaatgatggcatagtggttatacagaaatataactttgattgttttgagccatttggaatgatgtttatttctcctaactgattagctttgcttccggcaaaggggaggaaataagtttggggtttgtaatgctgctaattagatcattgcttgcctgcaatctacacatttataatgtgtctaatgtgggctggcatttcttcagaaaataagatgttaaaaaattattcctgatctttagtggatatctctttatctggtcatcagccagctttaattctttcaaaataagatattcacctctgcaactggatccaagtgcttcaggagtcctgttgtcctctacttggcctcaatatgggccctggaatccattcctcaggctgcccattgaacaacatgcgctatgcagttgggctgctgggtcccagataaacagtgatttcagggaaaggttttgtgcaacaaaatgagatcatttcatagatgtcataaatattttcactggtcctgaaggaaaaatgcatcatcttcccagacccatttcacacaatactagaggtgtttcttctacaagttgaaaaactgaatacttagaatggcagaattggatggatacatcatagaatgccatgctccgaacttgagtttcttggactgggggtggggggtggaggacagggaatcaaattgcgaaaacagaattttatattatgagcttacatttatattatcctcaaataatactatactatttcccctgttaaatactttttaaacatgatgattttgagttgcaattgggagtatatttgaattggagaacccctaaaccctcccttaccagtagaattacaatgaaatactttcacagtttatataataaggtctcagataaaatatttagtcattaggaaaagtaaattatattgatatttgtaatatcgtcaactttacctttgtcttctcaacaacaatttcgtttcatcatccaacaggtttttgacaaatgcagacatttataaaaagaaaaatttgccagaaaaatgtattttcaagtcactagctgaaatactcccacgactctctttgcctcctacaaagtacagctctgattaatttcattgtttctaaaatgacattcttttaaaaaggtgcctaatctcagcctctttttaggtttcattccatatgatcatttgtatacttctatttaaaaaacaataaacacagaaagaattacctatcagagaactggctactagatgatgtttttctcatgctctatgtgatttgttcaaaaattgggtataccttaacttataagtgagttgcatttccaacaattttattccaaacagttcgcttgtcatttggttatttaaaacttgaaattcatttcataaataaatagttatccttaatgatatggtccccagcgaacctgtaagagtctgtaaaagtaacccactttataattcacgtatagttctctactaacactgccattgaaccaaatcaccacatcagatgtttcttggagagaggggtgagttttcagagttagatttccaggaactcgtctttgctttctttgggtgagtgggaagacagggttcttctacaatctttcaacaaggctttgcccttttatggcaggggaggggtttcaagaagatgggaggtgcagcttgtgaagtcacagggatcagggagtttgtgctggagcttcctctgggggtcccctgagagccctcttcacttctagacccactcacctgttttcttgtgctggcctcagagataaactcgttcccttttccccctaattaaaataaaatcttttccttttaagagccgagggttcctagtactgcttctcatgctgagcttaccactactagattactacagcctcacagcttttctttactctccttcagccctgaatcaagcaaacatctcttgaggctggcaaccagaaggaaacaaaaagacaaagtaaaaattctgtctatctcttccaattctctttttaccttttcctggttcgttgatgcttcgtaaatttttttttttttttgagacggagtcttgctctgtcgcccaggctggggtgcagtggcacaatctcagcttactgcaagctccgcctcccgggttcacgccattctcctgcctcagcctcctgagtagctgggactacaggcgcccgccaccatgcccggctaattttttgtattttcagtagaggcggggtttcaccatgttagccaggatggtctcgatctcctgacctcgtgatccgcccgccccgggcctcccaaagtgctgggattacaggcgtgagccaccgcgcccggccaatgcttcgtaactttttagggaatccccagaccctagacctccttgagaatccgatgatggcgtacatttttttgttgttgttgttgttgtgacggagtctcgctcgctctgtcgcccaggctggagtgcagtggcgcgatctcggctcactgcaagctccgcctcccgggttcacgccattctcctgcctcagcatcccgagtagctgggactacaggcgcccgccaccacgtccggctaattttttggatttttagtagaggcggggtttcaccgtgttagccaggatggtctcgatctgctgacctcgtaatctgcccgcctcggcctcccaaagtgctgggattacaggcatgagccaccgcgccggcctatggcgtacatttttattagcctcaaatgtttacctagaatcagcctgtggagcacaggttaagaatcttacccagggtggggagcagtggctatgcctataattccaacactttgggaggccgatgggggaggattgcttgaagccaagagttccagaccagcctgggcaacatagtgagacaccgtctcttaaaaaaaaaaaaaaaaaagaattttatcctggaaggaagacaaatactgaacaaatctatgcttaagaggatgaatcagacagaccagagatcccttcatgttttttttctgggttgtagctcaacagactctgtgatgaagagctgcacaaaagccagtgtcctgcagagtgggcttgggtggcatgaggtccatacccctatccagcaagggtctgaacagtttcaaagtgtgtttactttctctcttcttcactcctgttctccaatttgcttcttgtactcttagagttaagccactctggactgacttctgtccactaacaggtgtgtgtgatagtggtagatgcaccagtgtgaccatcgtataagctactcccactccatctgccggaatcagggaccaagtgggtctgacaaaatttggctaaaaaatctttactacctcttaatgctgtagattatgattaagtatttgctaacaattgcccctgatttgggttttctcttctgattctttatccaattttatatggaaattttaaataaaattttatttggtaacgtataagtgtgctatggaaccatagacatgatgtaatactttgaacaaaagtacttaattagcataataggaagtatttttatgataaatgtatactcctaatgagattgaaacttaaatgtgataaagtcaaatagcaagcagtttacatttttttcttaacccatactaaaattgaaaattacttataaccattttttctactttttgaatactaattattctttacctaaaaaataatcacaaaaaagttgtgttttttcaattggcaaaaacctaaaaaaagatgtgtttcttatttggtaattgtttatcagactttaagtttagcagaagaaatctttaaccttgattttgtttgcttttttttttttttaagagagattattttttaacctacaaataggatttaaaatgacagtgggtgatatctggtgttcttttctacctctctctgtctctgtcacaaaattcaaatacatgtttcagcagtacaggatgttcttcagtacacatcctttgagccttcaaaatttgatttgactgtgtggtctgacgatagcatgttgagataagtacattgtgatagtaatctgtgcctgagccctaatgagcatctgctttctagggcgccacaacagcacctttctttgtttcctcttcctttgcttctttgatttgaatcttgttaaatcctgcaaatgggtcatttttgtttgtttttcagtatgcaaatcctcctagctcccttttttggggaaaaagaagccagatattttaaatataagtgaatgcactgggaattttaaaggagtcttcaggaagtgcacagccatagttcttctattagcaaatcagacatattattctaaaaatcatctagttaagttgatacaaatggaaatacctggtcagtttaattaaattcagtaaatacttactgtccaggcatggtattaggccctggaaggtgtgatatgtaattaaaacatagtgtgcatcatcacaaagtgcagtggaataattttatttgtttatttaaaacttatatagtgcacaaattttaaatctgtaggttgatatactcatgtaataaccactcaggtgatgatataacatttccagaaccagacagcatcctcacttgtacccactaaaggtaactactagtgtgacttctatctttgttggttggttgtatccattcttgtacatcataaagatgaaaccatattgtatgtatccttttctgtctggcctccttagctccttattattttggtttgagtcattgatgttgttatgtgtgcagttggttctttttttaatgctatgtgtattggattacaggatatattgtatcaaaatttatgtatccattatattattaatgagcatttggattatttcaatttaagactattttgaatacaattactgtaattgtcttgttcatatcatgtgttcaacatatgcacttactcctaagagaggaatttgtaggtcataggatatgtgtatgttcagcttgggtagacactaccagttttctcctgccagcaaggcatgagaaatctaattgctctatgtcctcactaaaacttgatattgtcagtcttttagttttagcccttctggtgagtggatatctcattgtggttttaatttgcattttcctgatgattagtgatgttgagcacttttaaaaatatattcattggccaattagatatcctcttttgagaagtcttttgcaaattttttgatcattttttaaaaataacaactttattgggatataatttacataccatgcaattcaactttttgttcactttttaaattgggttgtcttttttattggtttgtaggttttaaaatatattttggatacaatccttcatcacacatatgtatgaaaatatcttcccttaattttcagttttcctttttactctctgattgatagttttaataaatataagttcttaattttaatgaagtaaaatttaccaatcttttatgataattgcttttcgtgtctgtttaagaaatctgcttactttaagattgtgaatttttttcttttttttttttacatttcctactagaagctgtgttttatctttcacatttaggcctgcaatcaatttccaattaatgtttgtgtttggtgtggatagcatcaagatttgttattgttgtttgttccacctcgcccacccccggtgccccagtatggctgttaatgatccagcccaatttattgaaaagacatttccttctttgaatttcattgttgcctttgttgtaaactaggtgaacatgtttgtgtggttcttcttctggactcctgcttttttttttttttttttttaaggcagtctcactctgttgcctaggctggagtgcagtggcgtgatctaggctcactgcaacctctgcctcccaggttcaggcaattctcatgcctcagcctcttgagtagctgagattatgggtgtttgctaccatgcctgggtaatttttttgtatttttagtagagatggggtttcggtatgttggccaggctggtcttgaactcctggccccaggtgatccgtcacctcggcctcccagtggattcttgctctgtttcatatgtatccttgtgtcaatactaattactgtagcaatatagtaagtgcgtattctccaaagtggtcttaactattctaggttctttgcatttccttataaattttagcatcggcttgtcaatttccataaaaataaatctgctaggatttttactggaatcatactaaatctatacatcaattgggggagaattgatatattaacactaatgaatcttccaaactttaaggatggtatatctcttatttatttatgaatttacccctttaagtaattaataataaaacacaaaagttattgttttaagtacttgtttcttaaatacatccaatgatttcttcaagatctgtattatggtagttggcataggttctatgaagaaaataattcttttgaagagagagagtatgtttgttatcacagatcaaaattaattttgaaaaggagcttgccactgaaacctactctttaagaacagatgacgttctttttaatttttcttgcatgcatgtcaaaatataactgtatttcccctttatactctttattctctttgtttatttgatggctttgtttatttgatgttgttgtgacaccccatcaccctgccttatatgtttataaacataataataaattgaaaattagttttttttggaggattttctgacatcccttatgattttttaatatgcccctgatattgtgaaagcaaagattgggaattgctgcttagataccaacttctaagcaataaaacatgctgctcaatgggcttcagttccttcaaatcttttcttaaatgtttcaaaaatcttatatatatatgtatttttttcatgctttatattgaaagttttaagctttgattattgccatattcagctagccaaaaacaactacatagaaccttcaaagcgtattaattctggctaggttagcctaggttgagtaggaggttgaatagatgacttctgaagttccttcaactctaaattttatgattctgggaatttataacatccaagaatcacagaatgttagaatgggaaggaactttaagatcatctagtctaagccactcattttacagatgagaaaggctacccagagtgtagagacagaagcagagctctagggaggcagagagaggggaagtggcagaagggccagagctggggagggtctgggcataacctcacaggactggtcaatccatggcctgcagaggaaaaagggagaagagagaccacacaggagcttcagcatcactccaggaaactgatcacaggttggatgggatgcgaatggggccagtggcaccagctggtgtctgaacaggaatcagtaatggtcactctgtctgaggtcacctggcagtcagggccggccagacttttgtgctttctacagctagcatagctgcttctcatggtttggcagaacagcagcatccagagctgattctgccttgctctcatgtgtctaacctgttgtagatgagctgggtagcccagagctgcgccctgctcaccctccatggcccctggcctattcatggccttgttgtgtttctgaagtctttctttgccacattcctaaagatttttgttgttatggctgtggggccaaaaccctcttcactttttcagcatgcctggaattttcccagatcggctggatggactctacttcattcttggtaaagtttctctatcctgccatcactacctgttgtaattagtttggtcaacaacaacaacaacccagtgaggctctgattaaacaccacctctctctgttgaagccaaccctttcgttcaccacgctgatgggaaccaccttcctaatgccaagcactccacaccggtctctgtttttttccctgcgctatctgaatacacttggcaggtgggcagccttcaggaatcatcatacaattaggcttcaggagctctgttttagtcaattatgtggataaccttggaaaaacaaaatgcacagtaggtggcatcaacaagcccgttgtgcctttgggcacagcttttccctcgtgctgtttggatcatatactcattaagtccaccagctgaaaatgtcacaactggctgtgtgccatgcattaggaaaatcaaatacaggagaaattgggatatattgagcaaataagagagaatgatttttccacaatttacaaaagatttaccagtaaaaatgccaccttagttcatttacatatttcaaagatgattacaggtcactaactctttgatagaaagtataatttaaactaaagctatcaggaaccatggcatactaaagattaattagatattaggagaaatggtttgtgcaatttcctaagtcttttgaaaaggatgagtttgttttattacatttgattttcacccaacttcttaggattgtatgattgagtaaaagcaaggtacaattgtagctagctttgtttgtttgtttttgtttatttctcactgttttaagcgtccttcaccgtggttggttcaaaacttttcttcccataagtgtgtgtgaccataactggtgaattctcgaagtgttgggatacacagaaggaaaggaccgtggacaatttaaaatcgtgctatctgtaaggaaacctaagttgtatgtgtaccattattatttgacaagtgtcatagtcaaggaggtctccagtgaggaagtgtgttttaagaatggggagagacatgcctttgtagacagcatgcagtgcctttttggtagagcaattggcccgctaggactagaagattggttggaactgagagaatcatcttaaacaacatgctgagccaaaacattttttgatgttaataatattcatgtgtaaatagattgtttcaaatctctccgaaaacatagcggtagctttgtacttggacttcctttacttgtttaattttcaatggtgaaagatgggcatgatgaacaccttaaaagtcatgtggattatttttctgagttaaaaatgtatacattcaatcggaaagatataaagtctaaaaggaaagtgagggtcaaataagcagatgaggaattattatccctggaaatacagggaattttcttgttgatacaagtttacttcctaaaataaaagtttctggttttagtacctttcatcaaactttcttaatgtattaggaagcttttagcacagtttacccacgttctctaagaatctgcaggcaaattaaaaaaaaaaagccaggcatggtggcatacatttgtggtcacagctacttggaggctaacgcaggaggatccattgagcccaggagtttaaggctagtgagctaggattgtggcactgcactgcagcctgggtgacagagtgagactctgtcccttagggaagaaaaatgcaggcaaactgaagcaagtatataaaatttttttaattaatttttttttgttgttgttgttgaaacagagtctcgctctgtagcccaggctggaatgcagtggtgcaaacacagctcattgcatcctcaacctcctgggctcaagtgattctcctgtatcggcctccgaagtagctgagaccacaggcatgcgccaccacgccctgctagatacatgcaattctgtgttggttgtttgtcactcttaggccgcctgtaaagtttcattctttcgttgcttaaaaaatggagactgcttactaatttgatttttgcttcttcttatattttaacttgcattaagtgacatttcatttagactatgctgtataacatttaatgctaggggaaaaagactgagaaagtcacaaaatatcaggaaagaaaaggcatagcatgaggttgcatgtgtatttagaaatagttttatatcgtactttataaacagtaatttgtgtacatgcaggcttcctttacaagaacataagatccttaaagacaagaagtgtgttttgggccgggcgcggtggctcacgcctgtaatcccagcactttgggaggccgaggcgggcggatcacgaggtcaggagatcgagaccatcccggctaaaacggtgaaaccccgtctctactgaaaatacaaaaaattagccgggcgtagtggcgggcgcctgtagtcccagctacttgggaggctgaggcaggagaatggcgtgaacccgggaggcggagcttgcagtgagccgagatcccgccactgcactccagcctgggcgacagagcgagactctgtctcaaaaaaaaaaaaaaaaaaaaagaagtgtgttttgttcagttttgtgcctattacaatgttttgcacatagtaggtacttggtaagtgtttattgaattgaatccatattttttgtttaccaacatgataaagaggaatatgaggcacagacagaattctttagtgatgaaatgcttctgcttcaaatacatacgtgattaggataaaaatgagcttttagcctaaattacctaagtaatattctcaatctcaagctttactatgagacttgctcatagtgtccccaaaggcaatcactaccaagttagtttgtcgttgtcacataaacacttcataaaatgcaaaaaaccaagtattcaatgactatcttaagttaaatatcatgaatataatgtgtatagaaaagggaggcggtggacaggtgtggtggctcatgcctgtaatcccggcactttgggaggccgaggtgggtggatcacttgagtccaggagtttgagaccagcctgtgcaacatggcaaaaccccatctctacaaaaaaatacaaaaattaactggatgtggtggcttgttcctgtagttccagctacatgacaggctgaggcgggaggattgacagagctcggggggcgaaggttgcagtgagccaagatcacacaactgcattccagcctgggtgatggagtgagaacccttctcaaaaaaaaaaaaaaatggggggcccattctactctattagtataatttaaaaaataacatatggatggggcattattaattgaaaagcaattaaattttaaaaagcaaaataaatggctacatatctaaaaacaatatttctcaggatttgctcagggtttctaaggacctaaaactgtgtctgacaagaatatgtgattatattagttaggattctgataggcaatgcatgacatacatacgcaaacttggtatttaaggaatgtttacaaatgtgttggcaggtcttagggaaacctaaaagagacaacgacattttctgaggccagcaaaatacgagtgcttttactactcaaagtctgaaagagcaaagggtgggagcagttaccagaacctggaggggaagcccagtgctgggggctccctgagagaggtgatgaccttcagccaaggactaagcccatgtggaccagttatgtctcactttcctcctacccttagatctgccagtgcctccaattggaaccaataggaagcccgagagaggaggataccagtgatgcagggcctgtggtcggcccccaggtcacaggatagaggggaaaaggtggagaggcgaatgaagtgtgggaatcagtaaattttgttgaataaaggaatggctgcttactacttttcttaatggatagtttcatttctttcagttaacatggctacccattgcctttttaaaaatctgctgtgattactcaaatgaattagataagcagtagtgagtgcctaccatagcatttttacaggtctattgcaaaacaataatggaaactttctaagaaaattagttattagtgggattttttaggctgtcttcagaaatctgcattatcttaagtccataacctgaaaaaaacaatcacttgaatctcataattattcaacaagaatgtgaaagattatcacaccataaatacgatatattacttgcgacgcaactgaaaatactttgcaggacattgagttaatggatatttgttttctggttattcttacactactcaagcctactttttgcctaccttttccacattatgctttatttaatctgtctttaataggtcataagaattatatcagagattttgcattttaaaaggaacaagctctaagtttgattatgacaaatgtttgaaatgactcttcctgtacatacgtactcaagaagttttgttttgtttattgtggtaaataatgttaaatttgtcattttaaccattttttgtgtacaattcagtggcgttgaatacgttcacattattaggcaaccatcacgactgaagaatgttttttaatccttcctattgagaggtggtgtttctggtttcacggagatgtttttctctttcaaaaagaacaaccgcaaaatcccatgatcttgcagtcatatcagtaaagaaaatctgcccaaatcctatcaagtgatgttttaaagtggtattaaattagcaaagctattgtacgcttgttcatcaacacacacaaaaaagaacttgttggaaataacttttagaatgaacatgtccctttaaacaggaagatgctgttattttgtttctttttattttacctctgaaggaattttgtcagaagtccagctaacactctagactcgtggttgtaatgtatgggatatgccacactttgtgactcaccttttttttaatatatttttcaaatttgaataataatatccagactcaaacttatgttcctttgttcatttaattgagttcttgagatggtaataacacagcagagaagtttttaacctttatgtatgataaaacacataattaactcataatgttttatgaaaatataaagataaaactagctttcctctacaacatgagttcttcttacctgttgtcatagtaaccaggtaaacactactaaaaccaaatgggcatcaaaaaagtttttcatataaaaggtattgaaaatatttataggacctttaaaaaatagattatctgagtagaggaagaaaagactcaagtaatagaggagaagtagtcaaactttatttgcatatggaaagagagttgagggggtggaaatctgcgttgctgagaaaaagagttttcagagcagactgttctggtattttataccaattatgtgcagctattgctttgaataaattttgctgccctgctgagatttcctttttacaaatcctagagcaattataagatggaagtctggaatgtataaacaatgtcctttgaacagtaaatgagcctcattcttataaaactcaagggtaggaatgtactaccttttatcctatgtttctctgcctttccttcctccttaatcatagcacagaaattagggtctgcttcaagagtatataaaaacatgaattttgcctaaaaatacttttaaatgacaaattccatgaaattaacaaaatctctctgttgctacataatacctgtgtacttaatacatgttcaatacagcagttgattgaatattcctattctattctatttctagccttaacacaagaatctgtaatagattacttttttctatagacctggaaacaaaacactgcaccaagtcagtgtgcatggggaaaaagtgacaaccttagagcgcaacattaggctgagtttccaaatgccagcttgttttacgtgacagagcaatctgcactaatcaaggcaaacaatgtatacaatcctaaagagaagtcaactgtcacttagcgttaactgtaaaagcctgagctccattattctgccaaacttacagaccttatacaatgtttacaataaggtttggagagttgcctagcattggaatatatacaattaaacaacatagttgagtggcccttttatgtcagcactgctaaaagagcaccattatgtgtactcatgatagtcattcttggaactcttaacataaacaggaatagagaacattcatttgtaattctatctgagtacgtgtgggattttattttattttattcacataaacccccatggaaactaaagatagcaataataaaaggatcactgaatgagaattatttctgtgactgtcaaagaatgcaatacttatattgtttgcaactgagcttaagcactcaccttatttggacttttatttaagcttgtataaaaaagggagattgtatttaattacaaagtgaattttatttgtttgaaaataacactagaaattaatacaaaatgcatttcctgatttcctctttcagacattttcaaaaaatagcacatgcaaagaggcaacaatattatcgattaaaatgaaacaaaacacaagctaacttttaagttcacatcatattttgttaaagttagttaggctaattttatagttatagctcggccagaatgttttatccttcggtgttgttagcaacagtaaaagggaatgacacacaactgaagcaattttttttgaggaaaatagaaatatttaagagattgatttatagttctatcactcagaaatacaaatatatatatttttaatgtaggtattgggtttttattgaagttttctttctctgcctgtttcccagaaatgtttggctttgtaattctgagaaatagtttacatcaacaccagaataaaatatagttatgtcaactgacacaaaaatgcctgactcaaaacgaggaggaagatttgggctcaatttaggtcactgaagccagtgacgccagctgtttttgcttctgttttctagtctgttgtctgaaatttggaaatttgttaagcatgtttctagagagaggatttaactgcttcatacaagtttacctgttatttagcaaaacataaataactgtcagcccgataaatagatttacagcaggatacttgaatgattgagtgctagtgtacctcaaaatatcaaaacagttcctaaaatgtaatttttcaatgagaaatgaaatgtttgcctccctctaaccctggcctgaaacttgtagtttagagcccttaatacaaacaactttttgtcctttactttctcttagagtataaatcctcttcacttcttctaatacctagtggacttctacttataatcagaatgtatgaaaggttatatatatatatatatatatatatacaccaaaggatttcccaaacatgattttgtctctacttttggaaatgagggagggagtttcttggagtacaagttgtgagttgcgagagatcaaccagttgctccagatattctttaaacaacccagcattgtgattcacacatatttgtaatatgcttctctctccccaaaaatatgtatttcaaacattttcctctattcctaatttttccataagttgatgaataaatttagttatgactttataaacttaaaatatctcctttaaattaatatttttctagattagagactcctagttttaatatgtatacttacatagaaatgtctgtattccttgaatcattttagtaattctgcatttcattgttttcaaagggcaatcattacaacctcctagagtgaccaatttacacgcacttgaattttgtacatagaagcattatgttttcagttttatttccaataaatagtttttatttccctgcccagcatttattgcccttttgagttttggttcatattgggctcctgcctttcagaaactgtccaaaataactcccaaatggttccagttagaactggtggtttagtgggctaagtcttgcttatggatattgaagatcatctgtcacttttctgtcccacttttcccacagcttatccccatcagctcagtatgtcagtgcaatgaaagggtagggtgctatatgcagatttggagattttattgtggacagatgctttctaatactgtataaaaatgttgaaataaaaagacatgggtccgagagagaccattcttggaactgaaggcaagaattacaccatgttggtttcctgttacattttcttacattataacattcattgcacagatattcttaactaggcatatgggggattcataggttggtcataccccccccactctgagagcgagtacagtacagtctgatacaggaaatagaatatagtaaacagacattaacaatctaagatgagggccacggatggtatcaggagagagatctgcagaaaaactagagaaatagacctaatttctgtccaggaaagataaaaaatgttctatggatgaggcaacatccatcttgcatagctgtaggaatttcctggcaggtatagactatgatagaatttactataataaggaacattgttattaacaataacgatagtaatgatagtgattacaggtaacatttttaaatatttaccatgtgatgggcactgttctagaaaatttatatgtatgcaaatcactattgttaaaatataaaacatagataagtatgaacatattttatgttagagtaagtaataggaaaaaggaagaggacaacaaattgatgtggttgataaatagaataaatttaatttataaatgttatactttttcatataatcaggaaaatacctgtgtactgtgagaagtaaataatgttgttgttttctactgacaatcgaaaaactctataatacagataattaacatacgctaggaagtaaaaataaattgggtttatagaataatattggggagtgtgatgtggagctgttccaagcagaacaccagcttgcatttgtttttcttttacatctacacccacacaacagcctcatgggtttaaaaatatatctgtgcagttttactgtcttggctctggagtaccatactcaatgaaatcctagttaccagcataaggcttcagatgttgccagtacaggccagacattttttattaagaatcttctttatcattcctcctttcagaaatttctagcccctccctgattttcactgttgtgtctattcattacgaggtcaacttttcgtctcctttattttatttcagctttttgaaatctgttaacctctttccaacttacattccagaatgagtctgccctgtaattctatgttatctcatgacagctctttgggtacttccccagaatcatttctgcgttgatacgcttgtttgagagttagttacagaataccaataaagtcctgagaggaaacagaaggtctgggtagaaatgctgagggtagtgactccctgaagaaaagggtctgtggagaggtgggtaccaagatgggaaactagaaagcgttggatagtgattcttgcagagtgttagccaactgagaagaaattagaacccactaaagaaacaacacatttagagaatggttggaagctctcaaggccctgcagccccgagttgcagacaccttgtgtgggcggactccagggaagcctggagtcagggctgggtggcaacaagaaccaaagagatgagaaacagccccaggcgggaagctctgggtcctgtcctgcctctctgacaaagaggacaggacgctggtttgagttaaggttgaaaacgagggtaaactcagaaaagagattgcaagtgcaatgaaagaatgatttaatgtgtaaagatgagccagaccatgtggaatttgaaagggcacctatgatatgtctaatttgtatgtagtttatttcctaagattctctttgtgttttcttgtaaacagttaccaggacccaaatcagggatgagggtattccaagaaaagtacaaaggcatgaatccaagtggctctgtctttggaggggaaacctgtattcttttagatgatggtaacagaacatttcccaagaaatggcattagagactgtgttgaagggtcctctggggctgggttttggcatatgtatatataataattctaacacaggtagccctatccatgggtaaaggcaaaactaatgctaacaaataatattttctgtgagccatgatttagctaacccctgatacttcctttcatgcaagagtttgaatctctcttgaccaaaatatatgttcacttttcaaagttgaattaatggatacaaattactttaatgatgtcttacattgtagattttttaaaagccttcaagatgaagttacctcaaactttcctgccccaaatagaagttaataatatctacttaatctatacattttaaccaaatgatcaaatttacctgtcccacatactgtacataatactattagtttgagtgaaagctaatcaaagtaatcagaaaatagattgtatgttttttgttgaaattgaaggaatgaaaataagtttacttatattaaggctgacttttcatagataaacttccaatgctaggcagtaaaaacgcctactcaagattggagcagggtgcatttacctgtctaaccattttgtaactgtgccataaccatgttggcaaacagtccaaaactaaatcagatagaaacatgaatccatgttctcagagatattgttaatgagccacttgtgagcaggggtcgtgccttcaatttctttgaaacctttgttactcatgtagtggatacccactaataaatatttgttgagtgacccagacccatatatataatatcaccttattcttttaggaaaatggctactacatttctttaattctaatgcacacctttcctccccattctttaacatccctgaagttggggtgtgtcttacatttgatggcatgtttcagtgggtcatcagcctggattagagtcaagctcttcagaggagatttgtgtttgcttgtgatagccattcagggacactaccaatctgagactgcttgatattaaattacctgcttgaggttttcttgtaccacactggttgtgtggatgcagtaccagttggcagtttgcattctcagagatttttttttttcttcagctggtcccaagcttgagatatacatgtctacttgctgtttctttcagcatggcaagtttatttcttgttagcccttccctagaaaatgtgaccctttggtgtctcagttttctgtagcagtcttctgtcagactcttcattttggaacatttaaaaaatttattagtggtacatagactaatggtgtatcctactgttgatggcattttagacctgatgaaaacttgtttatgttgctatatatccagctgatccatgacatttgaaagcccagacaggttttgccttgttgactgccagtgggaccaaaaagcttattttgtatggaagatggttgtggtgctctcatacattgaaaattatgagtaagtctagatgaccatgtcttcacagtgttatttctgctaaacctctctgacgtttgggaaacaaacttggctgtagtttctttcgtcactgttccttgctgtgcataaggttcacttagagatggcactcaggcgataagactaggaatccaagtggtgtttaatcagaaatcctggttcttctccttggctctcactaaatgaactttcttctcctttgtggctaggctttcaccttgtacacttactggtcagctgcgttcattttgcattcctcacagcagttggtccgtgcccacctttttttttttttctttttacccccatatgatctgcaggaacgcccatctttttgttatcatgtgcagactagaatgtcctcctgacttatagtcttcactgggtaacattctatgcatttctctccttccatagtgttgctcactttcctaatgctctctccctggataattcgcatcttgtttgggaaaagagacaaggagaagacaattagttaacatttatttatttattgcctactattgtcaggcactttaagaaattattttatcaacaactgtagcaaataattattatcatcccattttacataagaggaggctggggttcacagaggtgaagcaactgcccaaggtcatatggcaggtaaggagttgagccaggatttgaaacctccgtcacacttcaaagtcactgttttcactccacctcactgcttcccttgaagcagagcttcacttagctttttgtttttgtttttctttatctccttttaggttcacttaagttacttatccacaataaagatcaaaactgtaaagaagtcaactaaaagcagatacagcaaacgatggcatcataggtgtgggttctggaacttgagatttgggctttaattttgttctgtttttgtttttgtgtgtgttgtgtacatgttggctttctgttactgtgttaacatttgagaaatgagtatttcagataaaaacaaaagctgaggacttcactgttccaattctcaaatttaaaaatcttaaaattagcctgacatctgcttggtgtctcattttcacatggatgtctaatttagagggttttttcctctttaactagagtttggcaaagcatcaattgaaagcaaacaatattttatatttatattttgttatattcagaggaatctctagaatatatcagtaccgtataatttattgaatacatttaatgccataaaagaatgattttaggagctttggtttttataggcatgattggcagaatatagaatctctagaatatatcagtaccatataatttattgaatacatttaatgtcataaaacaatgattttaggagctttggtttttataggtatgattggcagacataatgtaactcacttgagatggtaataaattgcaataaaagtacaataaaacacttaaaacactttgtgtgtatattccatatgatagtcatacatagatacattttaaaataataaacacttttctgataagtgttagaattatcatgacagggaggctgtgtggaagttagatgacattcttaactactatgtaaagattgaaattctagaaatgtgagagtgtgtgtgtgtgtgtgtgtgtgtatgtgtgtgtgtgtgtgtgtggtgtggggagggtgtagctctgccaaagcccctttgtacctggagttttgttgcctgtttcttgatcagacccaagcataggcttagatgatctgaatcagtttcgtaatctgatgagctctgctctgagctttggtaactgttgagaacactcaggagaaggccctagagagaagagaagattctgccccacagtcctccggcttggttcctgtgccaggcctgctttaatgattcaatgctggggttccttactcctgagattggttgtaacctggttagtgtctgaccttttcttacctgagtaagatctagagtacttctctgagagtaagagatacttaggtagcctgaaagcctgagggctgacatgtgatgaccaaaaaagcggtgcttcttttatcaaacaaaaaatctgaataaaaaatgtaggattgagttgggcaggagcaatgttagagttagccaacaatatcgagtactgtttgatttttttgttcagtatagttgttgatatttgttatgcaaagactattggtggctaccttagagataggatgaaccaaacacttaatcttgaatttctagagaattgcgtcataagatgttggaagtacaatcataatgactatgccaaatacaagttacaccacatcacatgcttttgtcattaatggtgacaggttggccaattaatctgtctctttggaaaaccttcaaagaaagattagcttatttgactttttgtcatggtgattatttgatgataactcactttggaacatcctcaagattcatttgcttagatgccctttaataaaaactcttgacaagaagataaagataaatattgaccattttatttatggaactacagtagcatactattctgtaaataagcacattgcaattattcttggacaatatcaaacctagtggaaatccttccttatggtgtacagaaacctacttacagaatatgacaggattcttaaataagaattagtccatttcatgtggttcttgcaagggcaagaatattttcttaactcttcacatcctaggattaatgacatgttcaatagatatttgtcaaatgcataagtaaatgggcaattgaatgaactcaagaaaatgtgtgacttttaaatggaaaatagtgaaagttacacaatatttaaaaagtaacttaatattcaaaaagctgctgaggacaatataaaagataccaatataaccacctgatagtgttaacagattacaatattgaccatatgctttacctccttttttctttttaataaaagaaaatattgcctgcctttcttcctcagaggcacctctcaccatgaatttcaagtctactcttaatatgcacacttttcctacatttttgtatgttaataaaaaatacgtacaactgtattttatgtttttaaatctacatttatgatgtcacaatctatgtatccttccgcagttttcttcatgcagcattgtttttgagaaatgtcttattttattcattttgttgcatagtagttttctgttttttaattatatcataatttgctgaactgtttactttttgatgatgtaagctgttgctggtttttccagttacagatatgtcatggtgcccatccctgtgtggatctctgtatgcatgtgtggtaaattctctgagacatgtgtctgcaagtggagtggggagtcgtggtgtggcatggtgtgtgtttcctgaaggggatgtcttgatttatccttccactggcatataggagagcactttgctccatacttcttttaaaaggctttggcatttagttagtaaaatagtgttttgtgtatgtgtgtttttttaagttcatcgtaggtggcttaactgcatttaatttcacaaaattcaaattccttttcataaccatagagaaagacagaccacataataaacaaaacacttgtgaatgaaaaaagagaacagccatggaatgaaataggagacataaagttaaattgcctttgttgctctccatcaaagctgctgttttgtttttttgagacggagtttcactcttgtcacccaggctggtgtgcaatggtgcaatctcagctcactgcaacctctgcctcctgggttcaagcgattctcctgcctcagcctcctgagtagttgggattataggcacctgccaccatgcccggctaatttctgtatttttagtagagatggggtttcaccatgttagccaggctggtctcgaactcctgacctcagatgatccacctgcctcgcaactcccaaagtgctgggattataggcctgagccaccgcgcccggccgcaaagttgctgttgaactcactgaagtgcgtctcattctgaaagggccggtggctcaccctcctgattacaatcctggttgaaaagactacatcattatcattttcagccctaaatacttagtcttgtatcagcctgaattgatgttttttgagaggcatgttataaaatgaaagtagatatctactgaaaggttctggatttaatagcttaagtgagtaagaatcagctttcacagttattggattaaccatcctgaccactctgaacatctttttgaacctcttttttctagaacaggttatcatttcttttatgtgaaaactacttttggcagaaatgaaacctggttttgtcagaagggtaagaaaaagcatctggctaattttatggataacattttttttttctttcttctcttgacagcgggttccattttcttctcagttctgcaggaagagcccatttccttgctatgattttcctttcatgtatactgtaaataacaaatgttagactgccttctaacttcccatctcttccattctttttggggtttcattctttaactgaaatgtctatctaagtttagaaatgattttggctggccaggtgctgtggctcacgcctgtaatcccagcactttgggggaccgaggcgggtggatcacctgaggtcaggagttcgagaccagctggccaacatggtaaaaccccatctctgctaaaaatacaaaaattagctgggcatgggggtgcccagctactcgggaggctgaggcaggagaatcgcttgaacccgagaggcagaggttgcagtgagccgagattgcgctattgcactcctgcctgggtgacaagagtgaaactccatctcaaaaaaaagaaagaaatgactatggctaatatgatgttccatatcttttgcttaaagtttctattcctcttgccaaatattcttcttgttcagagtattatttctacttacccagtactagaatctcaaaaaccgcctaggtttaaagtcttccacccagataccactcactgtgctttttcaacaaaatagcaccttttcttctttcttcacctccttccttttctgccctaatttgactggtgtcatatgttaacattaaaggcctgctcagggctgctacctagaaatcttgggcaaaaggcataagacagagcagagggcaggcattgtgtccttatactaagcatggtcaaatgcttgagtgtccacttgccagttatttgtgataaatagcacaaaacagattggtttttctcacaaggcaacaggttgtcaggtcacttgaataccctcgccctggtgaatctgatgcacatccaagtttggggcccgttgagctaagcaaaggagaacttggaaaggaaattggtgaagagcctgtgaggcatccactagctgaaaacaatagtaataactcttgtgctgtctgttgttcagggctatctgctctgccacttgccttccattatcatagaaaactgaatattgattgaaattattaaatcaagaagatggcaataatgattctactcgacagtctgcaagcctgagggattgttttacaacgaagcaaatggccacttcaatggctaatgcctaaaagaaaataaccagcaagtccaagggcaacgaaactctctctccttgctatgatctcctattattttctactggaaatgtgtatttgtgaagaatttctgaattgttagctgtaggcaaatacttgtgtgagccaaatggagtacagagcagtgaaagtggaggttataacgcaaagaggaaggcagcggtgagtggcagtgatgggtgtgagcccagctggggtatcttctgcagcctttgcaggcctgcacacatgcttggcctatagcgctcccgaagctggaccagccaaccgcagctttccttccagaggtgatgaaggtgcaggctcttgccctcagtgactgttgcgctgactttacaaaaatgaaatgaaagggacaggaagtcattcctgtccctccacttactggaattaaagtgaagaacttcaggcaaggccacggccaccctgcctctcactcagatgcttgaaatgccaccattttctccttattcttttcatcagagaattattattgattttttcaaaagagcatattttttctttctttctttcttttctctttctctctttctttctctccctctctctctctctctctttctttcgagatggagtcttgctctgttgcccaggctgaagtgcattggatcaatcatagctcactgcagccttgaactcctgagctcaagtgatccttccacctcagtccctttgttgctgggaccacaggcatgcaacaccatacctggataatttttttaagagatggggtcttgctgtgtgcccagactggtctcaaactaccggctttaagtgatcctccagccttggcctcccaaagtattgggattacaggcgtgagccaccttacccagcaagaacaccttttctaggagggataatattaagttttattgctcatttaactcttattattgtagactagatgaaggacggagatgacaagaggatgctgtatgtcttacaagatcataggaaaagggaggttgagggcacggatgtttctcacagagcttagggactggggagaaaacacacatcctttcttctacctcgccattcaatatggttatattagtgaaaccagaataagatatatcagtgaaatcagaataagatatattagtgaaatcagaataagttgactcaagggcatcattaaaaagaagcaaaacagccagagaggaaattgcggaaaagcaacaggttgtccaatggcctgtgttagaaaaggaagcaggcactgttgtgtagtggcagagccaggactcccttcccctggtaactagctagctgataacctgtggtcacaccccactgacctgtggtcatatcacagttgtcctgcgtgaccttacgtgagactgctagtctctctgaaccacagtgtccttatctgcaaaactggggaaacgatgctgactttgcagagctgttgccaggattaaatatattgtcatctgcaaagcccctggattgaggtgtgtgtgtgatatgtgttgattcccttacctcatggtgacatgctgagtggtgaaggcacccaggctgctcaccacctgcttctcctcctgttcctctgacttggtgcctttcagagtcattgaatgccctcaactccctattccccacaaaaagcaaaaagcagatgcctcttcaaagttatgaccagaatcagggcattcaccttgattgccttgctttgggtaaggacaaccactgggggaggagtggagccatcacctgcttcagggagcatctgccttctgtgggcccagaggttagttttaacttatctacaaggttaatggattgaattgtgtgttagattgtaattaagaattttccccaattaatgatgctggtgtaggaaaagtcataaatcctcccctggctcagcaggcttaggcttgaagttaagtggtgtttagaggaagttcctgtgttcctaatatatacttttgtgcacattggtttcaatcaatattgatgaactgatctcttagaaagaagataggtgcattagaccttagatcatctatttagtaaatcagtggctatgcttggagtattagtgtcaggccctattgtgaaacattactttctaagtaatggaaaagtggagtaaattatttattgagaactttggtcataaaatacctcctggtcactggaggcaataagattaaccatgtaacatgtgaaataatacatgattttggtcaacagttaataatgataaatgtggaggagaaagaggaaaacgttttttaaataggtcagaaacacaatgcttatgttggtttatacttctgcttgaaattttaaaagattaacatgtgtatcactttcagttatttgaaatatgctgttaagaattaaggatttaaaagtttccccaaaatatatttaatcttttaagaatttgcgctattaaaaagatcatggaggatcaagtaaaagcattttaaatgtaaatcttagaagcagaaagaatgatagtactttgtgtggtgtcctgtttatttttctaacatgaaattaaatgtcacgtactcgggaagccacccagtgttttctctaaatagtagatacttatgggaagtaggaataaatatgccagtgctagaaatgagacaaataaagcatgaatttacatgaatgaaaaccatctattaacgggattatttggaacataaatagagaccgaccctaacccaaacaatctcaaaacaattgcatcacaaaaaatgattagactgtatgatgggtattaggtcttttctccaaaacagtatcctcaaggtgctgcctgaactaaggaactatttgagctcatgcgatttttgcttgagcacttctgatttgtggctacagaaaagtcaaagcagcacataagggctgtgtgcatctaaagtgaatgcagtgtaagggcccgccccatccagtaagccatttctccataactgtgcatatagtttacattattggccttcatgtttaaaaagttactttggagattttttttttttttttgagacagagtttgttcctgttacccaagctggagtgcaatggcacgatctcggctcactgcaacttctgcctcccgagttcaagtgattctcctgcctcagcctctggagtaactgcgattattggcatgcgccaccacgcccagttcatttttgtatcattagtagacatgggattttaccatgttgcccaggctggtttcaagcccctgaccccaggtgatccacccgccttggcctcccaaagtgctgggattacaggtgtgagccaccgtgcccggcctggcaatttcttttagttagtgttttctgacatccaggaaaccaagatgtgaccaacaatttttactacagatctgaggaagttttgtggagtgtggttgccatgtgaagacctctctatcctgtgtaaagatttaagtaactttaaatatgagtgaattgggaagaaaatgctttcaaatgtaatttgacattgaaaatagtttccgtggcaagtttctggatctgtttttttagatattgacagttttaggccagatgccatggctggtgcctgtaatcccggcactttgggaagcccagacaggaggatcacttgaggccaggagttcaagaccagcctgggcaacaaagtgagattctatctctatgaaaaataaaaatattagctgggtgtgctggcaaggacctgtggacccagctactcaggaggctggggtgggaggatcacttttgcccaggaggttgaggctgcagtgagcaatgatcacaccactcggccagggtgacacagtgagacactgtctcaaaacaacaacaacaacaacaacaacaacaacaaacaaaccaataaccccaaaaataaattttaaaaatgagtcagagaaacctttattttttgcatatttgttttgccctcacgcaataatctgcctcaaaagtagtgagctgcacccgagaatgccaggaaatcaccgagaaagtcacacgatgtgtgaaagtgcgactttcaagctggcacctgttagtgcataggcagccctccccagctgatcacatattgtatgttgcctatttagcaatctctggtctgtgctctgaatccttatcaaattgtaagatcatctttcatggtggtatcatttcaatatgaatctgtaatattatccaatacttgccatacagcaaatacataaagcaaattgtagctatttcttgaagccattagttctgcaagaaatggttgtgtttcctttctcccacaccatttatggcagtgaaacatgaatcagaaagaccatgttcaaatctcagctctgctacttaccagctgtgagagcctcagtttactcctttcaaaatgaggataccgcgcggtggctcacgcctgtaatcccagcactttgggaggctgaggcaggcagatcacctgaggtcgggagttagagaccagcctgaccaacatggagaaaccctgtctctactaaaaatacaaaattagctgggcgtggtggtgcattcccgtaattccagctactcgggagcctgaggcaggataatcacttgaacccaggagggggaggttgcagtgaactgagatcgcaccactgcactccagcctgggcgacagagcaagactccatctcaaaaataaataaataaataaattaattaaataaataaaaataaaataaacataataaataataaataaaataaaatgaggatactactgctaattcacaggcctgtcaatcttttcagcctctaataagatatacaaagtccctcatatctggctagctgaagtttattagaaaagaagtgccaggttttttgttgttgtttgtttgatttggcacactatctctactatcactgttgataaaatagcccacagagaacaagtacaggtcaaagtagactttgtgaaaaatgtattgaattgaactgattggaattcagccggcagtgggtggctcaaggggaggctggagaagaagccaaattggaagaaggggaggtcacattgctgctggagagtggatcacttggcagtgagggaacagacagtcaaaatataagaaataggaacagctcaggagagcattcagcttccatgtggtgaaggaacaaatcatccttacatatcttagcagcttggaggctgttttacagtagagcatgatagctaatgtttaaattatgctcagtctactgtgaattattaagggaactttaaattatgctcaaggtattgtgtttagaagagaaggaaaatttacaatatggcttagaaaactttccattagaaggagtaaggtaacaatctatactgtattttatttaagccttaattatctagattaaaaataataaaaaaacttccctagaattcctttgcaaaagtgccagatgacttcacgtacaccttttagcttcctgacattggattgaacagcaatttcctcatctttccagtggaaagaaaaagacgactcaccctatagctggtaagaggtttaaatcagacaaaccatagaaagcacttagcacagtacctaacatgtagtgtgtgctaaatacattaggttctattattggtggtggtattatcaatgttacaactactattttacctttttaagtttgtttgttttttcctgaaattattagttccactcttttcacattgcctgtaggtccttgctctctgctcccctgtttgatctgtatttctttttctttcactgattttccaaatattgcttttatcatggataaatcactgcccataaaaagcttgggaatgggccgggcgcggtggctcacgcctgtaatcccagcactttgggaggccgaggcgggcggatcacgaggtcaggagatcgagaccatcctggctaacacggtgaaaccccgtctctactaaaaatacaaaaaattagccgggcgtggtagcgggcgcctgtagtcccagctactcgggaggctgaggcaggagaatggcgtgaacccgggaggcggagcttgcagtgagccgagatcgcgccactgcactccagcctgggcgacagagcgagactccgtctcaaaaaaaaaaaaaaaaaagcttgggaatggagtttatattacattgtatgtgatggttataattttctctcccttctctttctttccttggcttggatattcctttggtgtcctctccaggcaggttcacaattttcctcccaagcagtaaatagtatccatgcagcatgactgcttgccagccacagttaataaactgaagtgtgcaagtgtgttcctgttcatttttgttcagtctgcaattatatttatcttcttctttcttctcaccctttctagttgtaacatttctcttggtttaacaaaatgtcacaagcacattctaaaaaatgatactgcatggtatctactttttctgacataattgtaacttgagcacatttgttcgcaacagagaggagtgtgacatttctaaacaaacaaaaataacagcctgtaccatgtcttatattgccatttataaagcatcagctcaggtagaaaaggccaggttttcaactgaagtaaaaatgaaaaaattgagtttcaattgacatcagataccggtctttttcttgaaaagaggctttaaactttttggaatgatagttctgattaaacatttaatggcatgtataatgtggcattctaggaaccaggatctgcattgtaactttgtgtacctgaagtatacgattcagagaaagagagacagctacagaggtggtttgaatttaacttttaagaatgatcagagacaaatatttgactgaatataatgtttactgatggatgttcaaataattattatactaagtatactgaaaaatcaaataaatggagaacttttccatctcactagtaattctacctaaaagaaatttcaattgctcatttcatggtgatatttgaaaaacattaatctgatcctgtcactgtcccagccccacccccactacctaaaacccttagtgacttactggtgcctttacaagaaagtgcagactctttcacaggaccagctccttagaggagttctaggttggctcgccactcctcttcttcactgggttccaggcatgctggccttcacttccttacacacgcccagatccttcctgcctcaggacctcccagtatattccccttcttttgggacactctttctcacattctttacatggttaattcctcctccactttcactttgcattgttccagttgcttccttagagaggcacttcctggtaccccaggacctcaaagttgccatccttcatggtctcctgttctttctttatatggcacctactgcattttataactatgcatttatttgtgtgtttctttagtatctttagcatcttattcacaactgtgtacctagcacaaatagtaagcagtcagtaactgtgtgctaacttggtaaatactcatgtaacattgcatgaaaagagtaaataattgaaatggtgtgttgtccttgcatcctttctatgtctagtttaaacagtctacctctcatgaggtttcctcaaagaaaccattatatgattatcttaatttgaacagtaacaacacagacatttattgagatatgatctggatgtagcaacaaaggtaaagtagatatggcttctactttgatagaactcagtataagcaggagataaacatagaggtcattacaagggcttgtgtttgggggtgaggtggagagaatagaagaaacgttcatagaggagatgacattgaaacttagtgggttgggaaggaggagtgaattttgttagctggagaaggctggaaagccactcttagcataaaaactatcatgaactaaggtagaggggcaccaaagtatatactggattcaggaaattggtgagaagttctgtgtggctgagggtgcttgtgaagaagggtgggtaaggagaagagtggtaggagatgacacgagaaagatagactggatgtaggttctgggtcatttgggtgattttcctgaggagcttgggtgttattttgtaggccatgaaatgtttgaagcatgggaatgagagagcagatctgtgtttgagaaacatgatgctggagtggtggcaatgcattgttgagtgagggggaagtgacataagagggcaatgaatacaagtcaaatttggcagaagttaggttgttatggggagagaaagaatgaagggatcacttttaaaattctttttttaaattatgaaagtaatgcatgcttacagggataatttggaaaatgcagaaaattataaaaaagaaaagaacgatcataatatggtatgtggaaagaaaagcagagtcaaggggaaatgcttttacgatggtaaggatgacaggggaaacttttggaaaggatccagaaggatcctcccttttagagatctctagtttatttcttttttacaggccttaattttgtccatctggaagcaccacaaccttttggatctccagggttttgcacatatttttttttttctctctggactagttcctcctgctattcccttctctcccttttgcctggcaaacttttattccttattcaggccaatagtaatagtaataataagcatcatcatcatcatcatcatcatcataacagtagttacagaaacacacaacaatcacctatccagtgcttgtccctgtggttagtgctttgttaatccttacgtgagtcctgtaaggtaagcactactattaccccatcctacagatgaagatactaaggcattacaaggttaagtgacttgagcaaatgtaaatatcacaacttatcacttccctcaccaagtctggagtccctgtaatgtgatctcataagctcctaatttctcctgggagacttttatcatactcgtacttgtttgatgaatgccagttttctctgctggactgtaagccctgtgagagcaggtagtacgtctgtcttgttctctgctataccctccagtgcttagctttgtgattacgtggtacaagcacttgacactgttgattaccattctcgtaataaggtcattctaagcctgttgcactgacctgtaaaagtgcacaccttggaagagaatacagttggccttccatatctgcaggttctgcatccatggattgaacaaccacagattgaaaatatttttaaaaataaacaatgaataacaatacaacaacaaaaaatatagtataaccactatttacatagcatttatgttgtattatgtgttattaatataagtaattaagagatcatttaaatatacagggggatgtccctaggttatatgcaaatactttgtcattttatataaggaacttaagcatctggggattttggtgtcttctgggggtcctggaacccatctcccatggatgaggaatgactgtacttattagctcaccatgatagccctgggacctttagatgaggactttgggatttcctgggagctcagaggcctccatatcaatctgtatctttttttttccatctcctctaagttccagtaattccatagagccttctcataactgatctgattttctaggcctcaaactagatcacatccccatggagatccagatgacaaggactctagtcctgccatgattgatacttaaattctttgtacagcctctttaaggggttcaagtttgcttttattcaggttttatttggttttcattagatagataaaacctaaatataagattttataatttgaaaaaaaacttagatggaaataataaaaggatgattttttaagatactgctgcattggccaggcgcggtgcctcatgcctgtaatcccaacactttaggaggccgaggagggtagattacctgaggtcaggagttcaagaccagcctggccaacatggtgaaaacaccatctgtactaaaaatacaaaatttagccgggagtggtggcgcacacctgtaatcccagctactcgggtggctgaggcaggagaattgcttgagcccaggagatggaggttgcagtgagccgagattgcaccactgcactccagcctgactgacagagcaagactctgtcaaaaaaataataataataataataaaaacagtgctgcattaaacgttttatttctatattttgtctggtgcattgggtttaagtagatttgaaaattactaataacacactaaggttattttactaccaaaatgataaattattgatgtttacattttaatccaaatatagattatacttgtacattgtaaaggaaatactttttttggattagttttgtacctgttgcttctttatttcatttatcaaaggagataaaaactatgaaggcactggaaggtgaacactcatcagggttaatcacggatattttgaacaaaacaaccaacacccaaagagcaaacattggtttaacacaagcagataaatttagagatcctgagtgtttctttgacaattaatacaaaacatcaagacaataaacatgttatgatattttctctagtttttatttatttatttttttttttctgaagcatggtcttgctctgtcacccaggctggaatacagtggtgctcatcacagctcactgcagcctcaaactcctgggctcaagggatcctcccacttcagcctcccaactagctgggacaacaggcatgcagcactatatctgactgatttttatagttttttgtagagatggggtctcactatgttgccctcgcctcaagtgatcctcctgccttggcctcccaaagtgctgggattacagacgtgagccactgcacctgtcctttttctagttttagatacttgagtttgttgttgttgttgtttttcttaataaaaatcagtcacagtattaagtaaggtatttaagtcaggtcaacacaagtttcaaaatattggcttgggagctacttcagtctgtatctttatcttcctgtttaattatagactggaaaaggaagacagcatttcctgcttttacagtttcctaatgatgatatctcagcttgtaatgatttaatccaaaggaagaaggcattctatctacatctacaaaacaaaccaccactattacaaactgggttaatgttttttgtttttttttttttttcattttttattttttattttttttgagatggaatttcacttttgttgcccagcctggagtgcaatggtgcaatcttggctcactgcagcctccgccctctgggttcaagcgattttcctgcctcagcctcccaagtagctgggattacaggcacctttcatcacgcccggctaattttttgtatttagtagagatggggtttcaccatgttggtcaagctggtcttgaattcctgacctcaggtgatccacccacctctgcctcccaaatgctgggattacaggtgtgagccacagcacctggccaatgggtgcaaggttagtacctgcgtacagcactgtgaagattgcatgaagtgattcccatagagtgcttagcacccctcgtagattccacaaaaagagtgtttcctctgtgcctggtatacagcaggtggcagttgtcattcaggatggcagcaagtgctggtatggttggtgtggtcagcagggtgaagggtgtatgctgcagagtggagggggtgagaaaggaatctgcaaaagaaggagggtgggcttgaggtggggcttgtttgtaagtcatactgagggcagcagggagtcctgtggcctcatcaggttggagatgtatagagctgaaaatgagaaatgagctttggtgaaggggagagccacatttagcaccaagcagggcaggtattctttccattcatcccccattttttaatttttttttagtatttattgatcgttcttgggtgtttctcagagagggggatttggcagggtcacaggacaatagtggaggggaggtcagcagataaacatgggaacaagggtctctggttttcctaggcagaggaccctagggccttccgcagtgtttgtgtccctgggtacttgagatgagggagtggtgatgactcttaaggagcatgctgccttcaagcatctgtttaacaaagcacatcttgcaccgcccttaatccgtttaaccctgagtggacacagcacatgtttcagagagcacggggttgggggtaaggttatagattaacagcatcccaaggcagaagaatttttcttagtacagaacaaaatggagtctcccatgtctacttctttctacacagacacagtaacaatctgatctctctttcttttccccacatttcccccttttctattcgacaaaaacgccatcgtcatcatggcccattctcaatgagctgttgggtacacctcccagatggggtggcggccgggcagaggggctcctcacttcccagacggggcggctgggcagaggcgccccccacctccctcccagatggggcggctggcctggcgggggctgccccccacctccctcctggacggtgcggctgcccggcggagacgctcctcacttcccagtgggggcggctgccgggcggaggggctcctcacttcccagacggggcggctgccgggcggaggggctcctcacttcccagacggggcagctgccgggcggaggggctcctcacttctcagacagggtggccgggcagacacactcctcacctcccagacagggtggcggtcgggcagagacactcctcagttcccagacgggatggcgaccgggcagaggcactcctcacatcccagatggggtggcggggcagaggcgctccccacatctcagacgatgggcggccaggcagagacgctcctcacttcctagacaggatggcggccgggaagaggcgctcctcacttcccagactgggtggctgggcagaggggctcctcacatcccagacgatgggcggccaggcagagacgctcctcacttcccagacgggttggcggccgggcagaggctgcaatctcggcactttgggaggccaaggcaggcggctgggaggtggaggtcgtagcgagccgagatcacgccactgcactccagcctgggcaacatcgagcactgagtgagcgagactctgtctgcaatcctggcacctcgggaggccgaggcaggcagattactcgcggtcaggagctggagaccagcccggccaacacggggaaaccccgtctccatcaaaaaatgcaaaaaccagtcaggcgtggctgcgcgcgcctgcaatcccaggcactctgcaggctgaggcaggagaattaggcagggaggttgcagtgagccgagatggcggcagtacagtccagcctccgctcggcatcagagggagaccgtgcaaagagggagacgggagagggggagggggagggggagggggagttaatggttttcaaatccccaagtagtcaggtgatttctaccatttcactttatttaaaaatgaatacaactttctaaaaaaattattagactaaaatatattagagctgatattatggaaagaatataagaatagacaatattataaaaggatataaagataattgttataagccagtaaaaactgtttgacagcattttatggctggtcctgttatcagattttgttacttttggcatgaaaattaaagttaacatagcctatgatctgattagcctatttataacaatatttttcagtgttttacatttattcgttcaaccgtttttaagagtgctgagtgctaaggattcagtgatgagtaagactcagatcagagtcttggggaaaggagatggctgcatcttccccatggttatcaagggcatcatccaattctgtgtaagagctactgtagcatctcttgacccccagcactcagaagagcatgctgcagtatctcttgatctttggattttcaagtaccattttagcaatctagttaggaattgcagaaagaatagacaaagactcattcatgctgtctcaactataaatggacatttgtagcaggaatgtcctgcactatattctagcagtataaaaatgaaggccacattgctggcctccaggaacttacagttcagctggggaaagaaacaagtaaatatgcagaatttcaccacccagtggagcagtgcttttatccttttataagtatccttttctaatactgtatattcttgtatcattttaaaaataccagttctagtaatatcagtaagcatagactttcacgaagaacaaaatagaattatgaatttagcaaccctgtttcattttcttcctgcagctccatttcttagcttctttgcagtaagtttggaggcctgtgattgagttgtggtaagtggaatgtgggcagaaggaacatatactacatcttggcctgggcataaaatctcctatacaagccttcatgatctttcttcactttctgagatgaccttggaggtcaggtgtagaaggtggccacattctcggaccttgaaggatggccatgtgtagctcactcgcccacctagaaatactatccctgcccctggactattgaactggaatataaatgagaagtaaactttcactgtgtccttaagatttgaaggttatttcgtaagtacttcgtctatactgattaacacattctactttgcattctcaggctgcctgcctggagtaagcattagttacatgaagaaggggtgcaaggtggtgttggtggagaacaacatgaggtggcaagaaagcttggaactttcaggcgccaatcagtagtctggtgtggccagggtgcagcggcagtagagggcagtattcatgacaagaatggagagaaaagtcaaggcaagcatgtggaacgttttgtgggatgggagaggaaagccctgtcaaccggaggggacagcagtccgaggaatggggagtaaaatggggtggacaaacaacaaagaaaaggtgctagctggtatctggtaattagtttaaaacagaaataatttcttataatagagataagttttgatagtggacatgtccactgggttctctcacatacacggtttccaaaggtatatatcttagacccttccattgatattgatgtgtccatggatgtgaacagagcatgagaaaagtgaagatgctgagaacgctttggcctaagaggaaagaaagaccataatctctaccttcaagtgtcagaaaggatcgcaagtaaaagaggtgtcctacttgactaagtgacccctaagggtgagttagaacaaacaggtagaagtgtagggagacagatatgggctcagcataaggaagagctttgtcataattgcctgaagagcaatcggccaatcctggagaagatggcaatgagtttatgaacaggatgagttcaaatagactggttcttaacatggagggactgtcatagacagggttcaagtattggatgaggctgggactaggtaacttttggagcctctgcttatagtctcatattctttgatacttgtctgaaatgtaaaactttttgaaggtaggtgttatttaaactctgatttcaatgtgagggaaacgttatgataatgatataaggttgaaaaactttcaaagaaagaaaactattcttgcccagatgtctttacctggagttaaccacttgacacttaatacattttttttttttggagctgatggatatgcatttaatccagttaacatagccagatgggccttgcagtgatatcactgaacagtatctccaagagaatgtcagacctcagcaacaaggcagtggggtgaatgaaaaggcagatactatcttcctctgagatactgggagaagaaactttcccttaactcccttatttataaaaaccagatagcttagttgttcctctgaaactgtcagaatttctctcatcaccgcctctgaactgatggatggggattggtcttgcttactaaatgtgcattgtagcaagacacaactttatttaaaataccattaagatgcaagcacattgtggctactctgaaggccttcacttacaacatgaattattcaaatagcttcttaataactgtattgatttccacagttaaaagcagatcagattatggaatctgctcaataccacttaaatgtttatagatgttagagttgacaaagaccttttagacactgataattcctttcactgatcagaatgctagagatttggcattgctagtaatgctttgtgattatttttaataaatcaggaacactgtaacagcaatcatttaaggtcttcattcttattccattttagtcccagagtctttgcctgaaaatctagttatgctaaaaatctgaccagaaacttttacatttatattgatcagaagcttttatgtttcttttgcaaagatcaatgtagtaaacatgtcttaacctgcatgtattgatgtgaatattaaaaaatatctatgaatatttataatgataaaatccaataaggtttcagtttctcagttgcttttagtaccctgtgaaaaggtaaaagggggcaagtgtactagtatgagaagaaattataggtggagtaaaaattagatcttttattctttctgattctccccttatttggaagtctctgggaagggaaatttccagagtggattgattagtctgctcgggctgccataacaagataccatagactgggtggtttaaacagcagaaatttgttttttcacagttctggaggatgggagtccaagatcggggtgccagcatggtcaggttctagtgagggctcttcctggcttgccaagggtgtctccttgctgtgtgcgcatgtgtccttccttagtgcatatgtgtttggtgctggggttgggggatctcttcctctctcttcctcttcttgtaaggccaccagacctgtaggattagggccccagccttttgacctcatttaactttaattacctcctacagcccctgtctccaaatacagtcatagtaggagtaaggtcttcaacatagccatttttgggagacacagttcagtgcacagcacaaaggcagtgggttctggagtcagactgcctgagtttgaatgtaatccggggcaagttgccctttttgtttctcggttttctgtaaactgagaatagcgatagtaatttcacagctttatcatgttgaataaatgagttgagtaagacacgcaaagtacacagaacagtatatggcatttataaagtgctcaataaaagttagttattattaataaatatgtaactagatatttgtgcttttagctgagacttttatgattttatgtatgtggtttccacgtactttatgtttacatatcaaatgatttttggcatcaggattcagagtatgctttgaaaaatttctccatgaatcttgatagatgcttaaatataagggaatagagtgtgttttattttatacaatgtattttataatatttgtaaagaagttgttccattttcccacttaactcttatacgcacacacacacactggttttctacctgtacaataaaaaacagaatgttgttgtagaccttattactgtggaaatcaaagtacttcattcataacaagaaatccagcaatctttggactcttcctaaagagagtttggggtcaaagatatccccattgagttagtatctgggaaagctaagtagagagcagttgacatcttaccagaaactctacaagtagagtttctgcaagtacagaagtacagaagtacaagtactacaagtacagaaactctacaagtaaagtagagtggcctaattcattgaccaatattctatttcttgtgttaatggaatttgaattaaaatgtgacagaaagcacactgtgctaggccattcttgcattgctataaagaaatatctgaggctgggtaatttatgcagaaaagaggtttgattggttcacagttctgcagactgtacaggaagcatggcatcggcatctgcttagcttctggggaggccttagggagctttgactcgtgacagaaggcaaagccagagcaggcacttcacatggcgaaagcaggaaccagagagagagtgggggtggggggaggtgccacacacttttaaatgaccagatctcggtgtgaactcagatcaagagctcactcatcaccaggagatggcccaggctattcaagagggatccacccccacgatccaaacacctcccatcaggctgcatcgccaacattggagatcacatttcaacatgagatttgggtggggacaaatattcagactatagcacatgcttaactgattttcaaatctttcatgattgtcattatactatgaggctgtcttcagttcttctgggctgcttctaagtccagaggaggggctgtgctctctttctgtgtaagtcaaggtttttttttttgtttttttttttgttttcttaagacaaggtctcactgtcacgcaggctggagttcagtggcgcaatctcggctcactgcaacctccgcctcctgggttccagcaattcttctgcctcagcctcccaagtagttgggattacaggtgcccgccaccacacccggctaatttttgtatttttaattaagatgggatttaaccatgttggccaggctagtctcgaactcctgacctcaagtgatccacccgcctctgcctcccaaagtgctgagattacaggcgtgagccaccgcgcccagcctcaaggtcattttaatttggcaggcagggtttaaaaagaaacaagaaggagaaaaaaagaaagaaactgcccatgagttcccttagtgccctttctagcaggcggttgttccttcctgccttctgctgcctgcgttgggcctcctgttgcctctctattccatttcaagtacaggaacaagtcgtggatattttacacttagaaacatttcattctaaatagttgtacttatgagtcaaattataagactttcactaaaattagaacctaagagtctttttatatctgagctcctgctttaaaaaaatcaaagtgaaatatttatataacgcaaagtctctagctgctgtaggatgtgcagtttaaatgatctatccttgtaatacttctcagtattgggatggctagttctactagaatgttgaatgcagcagaaaataaaatcagcatggcgtgggcatgtacaacttacatgtaaactaaggtgtttaaattagatttcaaatacactggatactactatttcccaaactatgggcaaatgtagtactaagaagcagtctctctgggaaaaaaatgaaattttatacctatttctatactaaaaatttaatttgaattgagttataaacccgaatataaacttggaactgtaaatcttctggaagaagacatggaagtgtcattgtgatctcagagtaggcaaagcttttttgcacatgacataaaaagcacagatcataaacaaaaaattgataaatcggacattatcaaaattaaacatttctgcttaccaacatatactatctttaagaaactgaatagacaggttccaacttggaaaatgttcatagcatatatatctgacaaagtatttggatctggaatacataaaggatttctacaaatctaccataaaaagacaaacaatccaattaaatacttgaaaaggcactgcacaaaagaagatatatgaatggctagtaaccttgaaaaaggtgcttcacatcattagatatcagggaaaatgcaaattatagccataattcgaggccatttcacattcactagaatagataacataaaaaagacggccaacacctactgttagggaggatgtatagcacttggtattcttaatcatagtggaaatgtaaagtggtctaactatgttagagaactgttcagcagtttcttataaagttttcgtctcactctgttgcctaggctggagtgcagtggtgtgagcatagctcactgcagcctcaaatcttgggctcaagagatcttcctgccatagcctccctagtagctgcaactacaggcacatgccactatacccagataattttttaaattttttatagagatgcagtcttgccatgttccccaggttggtcttgaactcctggcctcaagcagtgctcctgccttggcctcccaaagtgctgagattacaggtgtgagtcactgtgcccggcctcttaaaagttaaacatacgtttaatacatttacctggtatgacccagaaataccacccttaggtatttaccaacaagaaataaaaacataggttcacaaaaaagacttacataaagatgttttagcagccttatttttaaagccccaaactggaaacaatccaaatgtccattaacaggagaatgggtaaacaaattatcttaaaatgtcatactacttagcaataaaaaaagaacaagcaactgattcaggcaacaatattgatgactctcaaaaacactccaagtgaaagaagccagttgcaaaaaaacgactttatcctgtgatttcatctacatgaaatccagatactggcaaaactcctctatgatgacagacatcagacagtggttggagagggagttgacaggaaagggacatgagggaacactcgtggaagggaatgtctcatgtcttgttttcagtggtggttacacaactgtatacaattgtcaaaactcatgaactgaacacttaagatctatgtattttattctgttaattatatctcaatttttttaaaaagcaaaacaatctaccttcccctgctaaaatgattacacactgatgaataatccaagatggaaacctagaggatgtgagaagatgttgtaagtgagatttcttgggagaaggtgatagctgcctccaatgtgcacaaatacgtctgtgctataagaatccctagaaagaatgttacagagagtgacctcgagtcaacaacctactaaggaaatggaaatggaaagtactgtatatttccacttctgtgccagcagatctagggacatcaccggagaggccattttagagtgactagattttggtgagggtgggggagagatggggacaggctttgctagcagtaaatatggcgaccctcatgcctcatccagtggagaaggtggtacatggagatccttcctggggtatttgaggtgttcttcagcttgggagtcaaacgatggatgaaagatcagttggtaagtgtatgctgaaggtggagctgaggtggaagcatcatcaagtcagggatgctggattcgttttaggtgtcagaattgttcttgtgcattgtttcttgaggccagggatgttgggtcctgcctcagataggagatgaagttcatgtggtcaggcttcctaatggagaaggataaatcctttatgttcacaattataagaaagtattgagaacccaggaggcagagcttgcagtgagccgagatcacgccactgcactctagcctgggcaacagagactctgtctcagggaaaaaaagaaaaaagccctctcccctctcccctctcccctctcccctctcccctctccacggtctccctctccctctctttccacggtctccctctgatgccgagccgaagctggacggtactgctgccatctcggctcactgcaacctccctgcctgattctcctgcctcagcttgccgagtgcctgcgattgcaggcgcgcgccgccacgcctgactggttttcgtatttttttggtggagacggggtttcgctgtgttggccgggctggtctccagctcctaaccgcgagtgatccgccagcctcggcctcccaaggtgctgggattgcagacggagtctcgttcactcagtgctcagtggtgcccaggctggagtgcagtggcatgatctcggcttgctacaacctccacctcccagcagcctgccttggcctcccaaagtgccgagattgcagcctctgcccggccgccaccccgtccgggaagtgaggagcgtctccgcctggccgcccatcgtctgggatgtgaggagcccctctgcctggctgcccagtctggaaagtgaggagcgtctctgcccggccgccatcccatctaggaagtgaggagcgcctcctcccggccgccatcacatctgggaagtgaggagcgtctctgcccggctgcccatcgtctgagatgtggggagcacctctgccctgccgccccgtccgggatgtgaggggcgtctctgcccggccgccccgtctgagaagtgaggagaccctctgcctggcaaccgccccgtctgagaagtgaggagcccttccgcccggcagccgccctgtctgagaagtgaggagcccttccgcccagcagccaccccgtctgggaagtgaggagcgtctccgtccggcagccacctcgtccgagagggaggtgggggggtcagccccccgtccggccagccgccccgtccgggagggaggtggggggatcagccccccgcccggccagccgccccatccggcaggtgaggggtgcctctgcccggccgcccctactgggaagtgaggagcccctctgctcggccagctgccccgtccaggagggagattggggggtcagccccccgcctggccagccgccccgtccgggaggtgaggggcgcctctgcccggccgcccctactgggaagtgaggagcccctctgcccggccagccgccccgtccaggagggaggtggggggagtcagccccccgtccggccagccgccctgtccgggaggtgaggggcgcctctgcccggccgcgcctactgggaagtgaggagcccctctgcccggccaccaccccgtctgggaggtatacccaacagctcattgagaacgggccatgatgacaatggcggttttgtggaatagaaaggggggaaaggtggggaaaagactgagaaatcggatggttgccatgtctgtgtagaaagaggtagacatgggagacttttcattttgttctgtactaagaaaaattcttctgccttgggatcctgttgattggtgaccttatccccaatcctgtgctctctgaaacatgtgctgtgtccactcagggttgaatggattaagggcggtgcaagatgtgctttgttaaacagatgcttgaaggcagcatgctcgttaagagtcatcaccactccctaatctcaagtacccagggacacaaacactgcggaaggccgcagggtcctctgcctaggaaaaccagagacctttgttcacttgtttatctgctgaccttccctccactattgtcctgtgaccctgccaaatccccctctgcgagaaacacccaagaatgatcaataaaaaaaaaaaaaaaaagaaagtattgagcctctgaagattgcctttcgtctgcataaacaatggactttttatataacttgattcccctatggagtctgctataatgatctcgaagaatattctttacttctgaatgctttcagtgctactgaaaagaaaaaggacttgagaagttagagagggtatcaacatcaaagtgacttcttcccttccagcaatggtaggaacaggaggaccctaaggcatttcttagtttttgtccaggtcctgtcaaaaatcttagctaatctccctgatcacaggagtaaaagtggatgaacaaggtgattctcctgccttttaagagtcaggctcttagaaactgttttagagaatttcacttgtgtatcattaatcccttaaatgaggtagtatcaatatggcgataattggaacttgactttagaaaaactgtgacatataactcaggtcccttgataatcagtgcctgtgatttttcctgaatgacagctatgtgtttagcacaggcaatatggaccattcctttgtatctgtagccctcagaatttgaacatctatgttatacattcttaagatgcaaaaatgttctgagacattgtccatcaaacccttgggaagtcgatccagacgaagtgtcgtattcacatactgcctttgttcatattgctacggatatttcaagattcatttgtcaggcacaaagttggtcatattttaacatctgttactccttcactgttactgatggaaagatgaagattctgtgtagtgaatacttgattggagtgttgacatttctgacagaactggcaatttttgaaattgagtgaggcattaggtagactgctttgtggattctatattactttcctatggtttatatactattcttgctaattgtgcaaaactgggagggacttcaagaaaaatgagaacaatctaggctttgcacttctcccttctcaagagttcctttagaagggctcaggtgggagcaacaaactagaccaaaaatgaagcaggtggcagtggtggagataagtttggtgtccctaagggcaaccatgaagttctgggatggcggcctttgggatagtagttgtcaatttgctattctatttctgtataagttttctttttttcctttaacatcgctcttccagggtccaagctaaatgaatggggcactatacagtaggttttaccttggagagtattccctttgagcattgtagacttctctagctatgctccccaggttcgtctggttatttttcttcattgcccttcaaatttctgtataaagaccttagctacagattcttttgctaaacacattgtcttcaaacaatgtgaaaatggaggctatgcttttccaggagcccattattctgttagctcctttaaaattttatttttattagatggtggcaataagaatgggacgaatgtagcaggaaacctcagggatgagctttctgtctgggtgggccttttccatgacagcagcaccctcggaaatatttgtgttcagccatatttaaacttgagtgaaaatggacagctgaaagttagttcttgtattaagaatgagagaaagagagattactacttttcaagttacttttaaaattcagaataaaaaggagaagtagcaagcttggtaatcaagtaaggtaatagataaaacatatcaacccaaaactttgtggcttaaaaaagtaatgatttattatttctcatgattctgtggctcaggaatttggaggggcagttggctgttccacatgtcatcatctgggtgaggcagtgggctgcattcagcaggcagcttggatgggctagaatattaggaaggtttcccttttaatagctggtgccccttgctttattgttagcatttctctctctacacggggagcttggcctttctcacgggtcagtggtctcaagatacttggactttttacatggtggtcagcttccaagaggagaggaataagctgccaggagcagcatcacctctactacacattattggtcaaagccactcaccatgccagcccaaattcgagcagagacgaggtagattctactttttctggtgagtaccagaaaggaaggagttgacagtggctcattggagattatctatcacagttacttacatatgttacttaagttggaagggaccattgtagcagttaaactgggtgactttaacttttttcaagtcaagtagcaatcatgaaacctttattgataatctcttggactcatggaggtgacttgatgaatcctgtaatgcttatcaaaactgcctcctgctcctctataccccagtcaaattatccattctcattaaataataacttggctattgatgaaacatttagttacacactctaagtcattaggatactataatgaatgcattcttgagtgctaggaaatttaggcaaagaagattaatacagtctggacctaaaataattcaagattttccatcattctatttcaattgctcatataacttcttgcttttccttgctttttatgtgaggagtataggtttcttttctcatagccagagatgatcttgaaaataagtgccttttttgacagaaaaaagtaaggctggaattctaatgtaaaaggtcctccaaaatacaaagaaaagcctaaggcttggacaatataaaaatctgccattcctattgcattccaactattaaacagtaaaatatactatataatcgttcctttattaaatactctgaagaaagagatgtggaatagcaatcagaggactgatgttcgggtcacctttggcaaatcacttaacttcaagcctttcttttaatctataaaatgaggataataatttcttctccacctacctcagtgtttgtgaaacttaaatgaataaaagtattcgggaccacacataaggcataataactgtatgattaaaaaattgttggtataccaataaaaaagagataaaaccccaattaaatatttatatgtcccccataaggggctcatggtctcaacagagtgtatatccagtaggttatttagttaaggtgtagtgatagtttaaaataaccccactctttccatagaaagttagcaagatctttcttttcatttctgcttggttctacttattctgtagaaagttggggtcatgttgaactgccctggctaaaataccagtcctctttaaatgtctaattcctgagaaagctgggtaagatggcagaacagtaacaataggactcagggtcgggcttgtcttttctgccctgggattcttaccatttctggccatctttgaccaggaagtcaaagctccttttatttatttgtagtccaagctctttttcatggctgatttagtaatgatttttaaagatcatcagataaccattagataaaaataattctagactcctgctggccgcaagataattgccatatttaactgatcataaacaatagtttcatttttcagggatttagttaattataagcctgtgctgtctaatagggtagccacaaactctatttaaatttaaattacttaaaaattaagtttcttagttatgctagccatatttcaagtgcccattagctgcatgtggctagaggccactgtattactgcagatgtagaatattttcatcgtcacagaaaattctaatggatagcactgttagagacttctttctaacctgtgcgttgctgtttttttttttcctttctgtctccctcaaaggctctttctttcatgtttgtttgttttgggtgagcaatgtggggggaaaaggagctcacactcatgccctattttttagtagtgttgatgaaatagttggtaattggatggactgaaactattggctagagtaagattttgaaaatatttttgaatttaatatatatgtattgcccaaagcagtagttgtagaggtttttatttgttttttaaatggactagaatcctgtatcagctaaacacttctcatgaactagtgactacagtttttctattgaatgttatttcattacttttaaacgttttattttataacaagctcctttactacagtgaaaattcagctcctgtgctcatatcgaagtcatttgactagtatatgcccttttctcaatttaaacacaatttctaatccaagatccattcagatcttgatatgccaattaaaatattgactttaaacaaaagggtcataaaaatgtgagattaaaatgattaggagctgagtccttatcacataatccaaagtaaacgaggattgcacaatgccatacttaagaggaagcgcagttcagttgcacagacatgttcctagatattccaaactgctttgaaattatagtgctttgtgttgaaagattgatattaaaatatacttgggaattaaaattcactttatgaagaattgttgccaaaaggctttaagatagcactgtgaagacatgatatgaaaaagaacagtctccaaagccaagccacatttctgcagatcagaatcagaaaattttatgtaggcagtgtggcttaccaaatgtgtctttcataacggaagcctatttttcactttaacattgacatactgtatgtaaatccaggaatcaaaattatacctcagtgtcacttaatgtttgttatttggaccaaatttcacttgttttaattgtgaagctaaaaatggaattttgttgctgaaaacttgaattcagtgaactcaagttctcataactgtgaacaaacttgttttaaagtttttttgtgttttgttttgtttttttctggcgacaaggtctcacactgtgggccaggctaacgtgcagtggcacaatctcggctcattgcagcctcaacttccaggctcaagcgatcctcctacctcagcctcccgagtagctgagactatgggtgtgcaccaccacacctggctagtttttgtatttttttgtagagacagggtttcaccatgttgctcaggctggtcttgaactcttgagcccaagcgatccacctgtcttggcctcccaaagtgctgggaccacagatgtgagctacctcactcagtctaaagattttttttttttttaatattcgtatcaaaaccagtgagagtaggtgctcatcccggagatgtgaccagttagctagaagccaggaacctcagaagagaagagtagctcgtaactcagcttgctggatccaacaggatgagaattccctgaggattgggcaactagggtgatttcccagatctaattctgctctgttctgggtagttgggcaggctatgtagtatatccgaattccaaaccattaagtgaaatgcttgttattagtgatacccaatcattgtttcatgacacaccagtgtgtcacaaagatttcctgcagtgttggcagtgagcctcacttttcccaaagctctggctccttctctgacacattgccaccaggtggcctgcgtgacctttactcccttttccccgcccaaacatcttacattccttataccttatatctggatttaagaaaagacttcttttggacaattgatttgcagttcctaatctgagttcttacacagttgccaagctattattgctgcaaggagttaaatcggttttcacacagttctaatagtttattgtcaaaatgtcatttatttgagttaagcattgccaatgcccccattaaaccactgtttcttttatttcctggagtttggaaggcattcgggaataccaagtgaaaaggaagagtgaagaacagaaaaatgttagtgggatggcaaacactgtgaacattgctgtttctagtgggccagaaaaatgtatgtataaatcttccctgttcttagaggcgctttcagattctcctccacaaagcttcctatggtcaccatttagagtcaatccccttttccctgttctccatggtatgttatttagttctcttcatattactggatcagagtctgctttaccacttggtcatttgtgcatgtctttttcttactgaaactgtcagattcttctttgtatcttcagaagtacatataatataatgtaacatatgcaagtttatatgtagacatacatttttaaattctttaaatataatagattcatgttcaataaatagtattgaatacctattctgtactatacaaaacactggtgataaaacaatgagcaaaacaggcacaaccccgtttctcaaagagcttttataatgaggcagaaaggatggacattaaataataatttagattgcagctttgtgagtccagaaaaggagatatacagtatgctatatgagggttatataacaggaagacccagcctattctggggattaagagggaagattttctggtataagtaatttaagccgagccttgaagaataagttggagttaactaggcaaagaggtagagaaggagcattccatgcatagagaatagcatgtgtgaaacatactgctggattggttgccttgcaagtataaggaactgaaagtccagattacctggttcttagtggtgaggaagacaatagtgcaagatagtactggagaaataagtatgagtcaagtcttgcagagatatgtgggccatgtgaaagatttggttctttagcctaagattatgaaacagactttggaaggtatcaagtagaagatgcttaatctacatttatcttaacagcctcccagtagattcctggcttccagcctctataacttaacatttatacttattgttctcatttgcattgtgactgctgtgggaaacgaggaagtagcatgtcttctgcaggtaatgagaacctttgtaccaaaagatagtgggatgcttgcttcctcagaaaagaatctggctagtaggttgattcggtctggatccaaagctttcaaaacttgaattttattctgtcttgaatgtggaccacttagtttattctgaaaatctgatttctagcagattttcagaataaactaataaatccaagaatggcctgggttacctaggcaatagtctaattttattagactattttattagactattgcctaggtaacccaggccattcttggattctgagaccattcctcctgccacacacaactccccgcaagaacacttagctatcagtgggaaaaatccagtgtctttctcttgctgggaccgtcatgtccatatcagtcatatacaatatcacaggtaaccctggaggagggaaagggggatggggaaccaaaatgcaaaggacctggtgctaagcgccccatcattatttcatgcaactgaaagtcaagcagataggagagttgtaaaacttgtctacaatgagaataagcaaggaaagaattaagggtcatttcacatttaaaaattcagcttaccacttgaagctgtcagtgctttgtgtgtagaactttcaaataattaacatttctcaaacatcaaaacacagctagaggtgtgcataaataaagaggcacaggtcccaaaatactatttttactttttgaactggtaggactaatagaaaaataaatgaatacaattgtttagattaactagttcttatggaaaagaagcacgggagaaagtagttgttaaccaatacttgattatttgttaatcactactacataagataaaaagtagaaaaatagggatatatagcatttacttaagagaaacatctctctcttaaactttgtatttgtttttaagcactccaagatcttggccaggatatttaacctttgatctagtttcccactgcatggtatggctataggaaatagtggatgtaaaagggcttttaaaaaatatagaccatgatacaaacatatttactagtattattgtttcaattatctattatggagtaacaaattacctccaacttaaaacttaaaatgacttaaaaatgacttaaaacttaaaaatgacttaaaattttgcattttcctgggttggctgggatcagctgggtggctcttctgctccatttgactttggctgggtcactcaggcagctgcatgcagttgggagctcagctggggattgaatgtccaagatggcctcattgacatgcctcacagttgtctggctgttgactggagtgcctccattctcctctgtgtagcttctcattctgtacagcctctctttccatgtggattctaactggaaggcagactagcccagatttctttacagggtgattggctgaaagcctcttcaggcccagatctgaaagtcactcagccatacttctgcattctactgtcacacagggccatcccttaggcaaggagaggtgaaacaggttccagtcctggactttggaggagagaatcacattgggaaagcacatgcagagtgggagggattgtgggcaggtatttctggaaatgtctaccacagttattattaaatacagcttgaaagagtaaaagattacaatcccaatgaataagaatgcttattcattgtactgcttccagatattaaaattattaagttacctttaacatatgtgtgctgtacataataaccatggcatatattcaccatagctattctaactgaaggaaaagatatattccccaaaaacctaattcttgatttagtcttattgtttaattttttaaaaagtgtactacaatcatagtttttattgtttcagaggttaaatgcactttacgtgtttactgatacaaagggaattttgaactccctctagtggcaaaagattttcttttattttttccaagagcttacttaataagatggctgacatgtataacaacatagtttcaaaaatgacctgttcttaccatcagaagatgcccactttctcctgtgtgagttatggtgggtcctttaatctcttatgagaaatgttaacctttccaagaaacattgatcatattatatgaaaaaaaaggaagaaaggagacttcctgttaactttaaagtgcaaaaactgctaactgctccctttagtcagggtcttaaataaaaactattatattttgacaattaaaatatcattttccctggctaaaaagtaaattaaattttaaatttttgcctgaagaattattttttgaacagacaaatgtatttaattgaaacaatctttacatagaaagcaatagataactgttgaaaagtgcagcttggaaagcactaatagccaaactaggaggatcatagggatcccaaagtgttatgcttgtcttgaattcaaatttggattttcatagccaatagggaaggaacatggttatcaccattacgccatacaaaaggaagcacaatgtcaaagggcgggaatagaaaaacagctattacagactttgtaaattaagttttcttatccccaccccattgccaaagagaattaataatactaattaacttagtctgttacgggtccatctatagacagatttattctggttctttatatagtaaaaggacatttctgtgatgctaaaagacattctttaaaaatgctcttttcccagctatttgtggaagccgatccaacctatcctgtactgtctcgtaggttgacacccaaaacctctgttctcctacccacagtagtaggaaaatggccagggatggtaagaatccatagagtttttttcttcttcttcttcttcttttaaagctctagaaagtggaacctaggattataaaaataattccccgacatgctgttttgtttgggactaaactatgaaatagcaagatttcactacaataattaatccagccaataaaaagttagactttgtttctttccaatacctctttttagttcgacatttataactaagtctgtgtctcttgtggtctcgattacatccggtgttttcagctggcagcatttcctctgctgaggccaccccacgttttttgccaggctacatttctgtgaatataaagagagaaaaccaagttgtattagagagtgaaatttaaggagaaattgagtataactttgatttttgaaacaaaaaccaagccactgtatttgttataaacaaactggtgattaaaatatgtaggctccagaagtacatggaaagtcttatagccatctcgtagccatcctgcatgttttctcttaaatatttataataacctaatttaactaacaaacagagaccagagattcccttccagctttgcttgcacagatttgaaataatgaaagtgaatttgcatttcttaaaatggtgttttcttccagctctcatagaaatgtttttggaacagtgatctgtgctaacagctgtattcaatcttgagtaaaagtcacttcctgaagagaatgaaattcaacttaacattcgaacttgcctagaacataatcctgtagggtgagtgtactatgtgattatgaaactggacacaggcaccctgctgagatgatttcttgtaaataatacccaacagaaaccattaatcagtgtcagtgtttttaactgaagaattaatattctaaaagtgttccttattcatacagataaccgtcttagttttcaagaattttagtctttgatattttaaaaatgtaattcccttgtggaattggatctatatgaaatctctatgtattaatatataccatcagatagacataaatatagatacagataaacatatatgtttatatatttaggctttaacaatttttttaattgtgtcattcttgattttcaggtaaaatttatttttgactcagttctctttacctattcactcatttatttattgcagtgagctcaatttaaatagaattttgttcctggcctcataaaattagttgtaggtatatatatgggaggtacagttttagctatgatggatttaaaaaatatctcttagatagttattattgacctctactttcctaaatattatacttctttattttaaagaaggaaaatgttgtattaacgtaacttggatattgctaaaaccttaatggaatcatcccttagatggaaaagtgtccactgaatcttctgttttctttatggatcattattttgtcatctaaacaatgaatgtggagttttcagtcataggctatcaaattgattagagataaagtctaacacgttaaggcagaattaacaaacatacagaaaaattccaaccatctcaatttgtaggaatcaaaaccgtttccggccttactttggtaacaaaaaaggagctaggctttcttccattccttgaccaaaccactaagttgccttgaagacctttgtttataatgtcttcttacattcttttccccctgacatgctcccctccctccagcagtgagatactaattaaagagaggccactgtgaccctaggttgtttagaagtcacccggaatgaggtggcggcacagatctggagaggaagcgctcattcctaaatataacacagtccttaagaccatcttgtcaaaaatctgttggcttctaatagcaaacaaagtacctcctttgacttaaaaggtatacacttgaaactaaaatggaatctctaaaacctactttaacaacatctatatccactttttataagaattggcaacaaataaaattaactcatgtatgtcacatgatagtttctttcagagacactaaaatataaacattaaaaacattttaaatttgataaaggataatctaatttttatgtttgttgagggagagggagcatgtatcttgccattccttttaaaaaattagagacagcttagattgtgtatgagaagactcttttctttttttccctctctccttccctctttccttccttcctttccttccttccttccttccttccttccttccttccttctttcttttctttctttctttctttctttctttctttctttctttctttctttctttctttctttctttctttctttcttctgtctctctctctttcttcctttctttcgtttggacaccaggcaacactttaattgggatgataaaatgaacatggtgcctgccaatcgtggaagtgcaaggactgcagatttttcttaatataagtgttttgaaagacatggaaataatttaataacttgccttaaatgagcaggtggtgctgcctgacattaaattatttccttcttaagtggacttgctgttgctaagtactaacttacaagaagcagtttcttgcacaattttattagtgcttgtttagcaggatacttctgattgcaagcacagtaatagagacccactactgtttgtgttaagtaatgaggtggaattgttctaagaatatataagggaataagaatcttagttatgaaacccgatctcaacagaacctgagaaagcagcctcctaggtgggtctatggagaccagttggatgacagttttccattcaaggcacaaaatcaagagcaggagttttgaatttttccccttgaacttctgccatttctgctgtagttgctctttgtttagctgggttagagtccggctgctttgcttcttactgtctactgccattcttctactctctgagtctcactgtcctgtgattcactttccaagtgatgattcctctacctcattgcttctccttccttccagcattgcttgctcatggcccctcagctaccttatataaggcctccttctccatgcacagtacccggtggttttagactccctgtaaacactgactgaatgaatagatgaggaacattgttagggaattataaaatgtaagcattttgtgttttcttttagttagcctttaagggagctaagaaaatataaattaattaaaagccagctggaagacaaatgttattttgaaaaatttaagagacctaatcatctccctttaggttaaaaaggattcactgtaatagtagtaagaaattatttatttacagaggcactgaacaagtgtataccgttaaacttgagattctggactaccttataaaaaatagtagtgcttttaaatgctctcacttcacactgccccatttaagcagccacactggcaggaatggagatgataatttaacttcagactccaagaagggaagcagtcattttttattgaccatattccatttaggagccaaaattaaggtctaatagggatctgaagactttttttttttaatccttcagatcttcatcttaataatttatctgtgaatagatgatcaattcctgattatttttaaggcagtctttttttaaggatttttaaatcccccaccttcctattgctgctcattttttccccctttttagttgcccaggggacaaaaataaataccaagaaagagttctcaattcttcatccctttgctgccttttatttttttaacatgaaaggttataaacattctgtaaaatctttcttaatttctgctattcatatagtcatttgtgagtgaatagacagtagtcataagaagacccaaatatgtatttttttaatcatataaagtttttaactgaatgttgggttgaagaagaacccaaacagcagtttaaaattcagttgctcagcttcccggttatagcatgaacatccagaagtggccagttaatggggcttcattcccctgcactttggaaatgaccagcagtcccaaatgcatttgagagtattttcactcatgagagaaaacgtgcttctcagattctgaaggctttctgagtgaaaaccagacaaaacagacagtaagagtgctaataagtatgagacatctttctttttgtttccccccccccccaatctctcacctctggcttaaattcttaattttatgaaatgatacttggctgggtgcggtggctcatgcctgtaatgccagcactttgggaggctgaggcgggtggatcatttgaggtcaggagtttgagaccagcctggccaacatggtgaaacctgtctctgctaaaaatacaaaaattagccagcgtgtggtggcgggcgcctgtaatcccagctacttgggaggctgaggcaggagaatcacttgaacccaagtggcggaggttacagtgagctgagattgtaccactgcactccagcctgggcgacagagtgagactctgtctcaaaaaaaaaaaaaagaaatggcactttttttcttgaacttccaagtcaataaattttaaataacttttctttctagagttgtaacagtgtacaaggcattgaggtagaccggatgctctggacgagtttaccctccagtgaaatggacagatagatagaaccaaagtacaatacaaatggccttggtggggcacaccagtttcagtagtgatatcagagagagagaggagcgaaggccaaccaggggacacaggacctcaaggaagtttgaaccaggggtctagatcccaagagaagagccaagattggagctctggctgtggtattcttttgttcactggtgattactgaaatgttagttgtgggtgagatcatacgtggaaaagaacctagagcagagaaaaaaagatggtaaaggaggaccccaaaagagtagacaacttggaattccatgaagatgagtggctggtgctgtcataaaactacatcatgttgtgtggggacaagtgggagtcagaagccaagttatagtggtctgtatctggaatgggcagtgaagtgcaaacgtccactgacggacagtctttcaagaactccagcagcgaaagagagaaggaataaagtagcataagaagcaagggaatcatttccctcccccccaccccgcttttttttagaatagagaagacttgagcaagttagtttactggaaaaatgccattgcatctgctgttcacatttttaaaaggaaaatatattaatgtattacttttatagtaaaaaatgtattaagttgccaagaaaaattgaaagaaaaaaagaaaagaaaagaaaaagaaaagcaagcaatcaaactggtatagaagttgggctggggaaagtcaagtgagggtatgttatagagaagttcattcgaaatcaaggatgcaaatggaaacctaaatcttgaacacagagaagctatctagctaggatagagaagagtgccaagaagagatgcaaaagtatagatatgtatttgagagataactgagagaatttcatgtaaataatgaatgatctctaccttatcattgtaggggtaggattaggaatttgagaaaaaaactaaaaggtttggaattaattctccttgggatgggatagggagccacttgcaaatgagtaaaatgaatgctatacagcagtaaaggtataactaaaattgagtttttagcatagtatgatttgcctgggaggttgtgagtaactcaggagaggaatagaaaaatctggtgaaaaaaatgcttattttaaagataggatgaaagggctatgaataccaggcactagaaataacaaacttgaattagctgactggggaatttaggtttgttaagtaaattaaatgtggtggggcggggggagctgtgaggggtgggtgctggtggtgctagtggtggtgatggtgacctcatagactagaggatgggagaataaagagaatgagggagaaacttacatttccaggtctgaaaatgagaataatagtgtggtgtggggattgatgaaataatgcctgtaaaatacttaaaacaatgtctggcacaattaaaatgtctaatgctataatttttgtgaacaagagtacagaatagatggaagaattggaattacagaacttgatgatacacaatgatgtcagtcaatgaaagaaagtggatgtgtaggttttcttgaagtggaactgtcaggcttactcacgaccccctaaactcaaggcttaggtttagatgaaatgatatcacccaggaagagtgcttagctatatgctatatttatctgaaaaaggtgggcattagaagaaggtaaataaatgatgataaatatctttgtcatttaacaaactgaaatgtctgctttgtttcctacaaaaactctgtgaggatgatattgttgtctttttgctttttacagctgaacagtagatttaggtgaaagtagctaacagccagtagaactgtctttttgacacagtagttcttcttgaaagcccattccttgcccgctactcattactataaatggcagcatatagaatgagttagagtgaagacatttatgcagccaacagacacatgaaaaaatgctcatcatccctggccatcagagaaatgcaaatcaaaaccacaatgagataccatctcacaccagttagaatggtgctcattaaaaagtcaggaaaccacaggtgctggagaggatgtggagaaatagaaacatttttacactgttggtgggactgtaaactagttcaaccattgtggaagacagtgtggcgattcctcaaggatccagaaccagaaataccatttgacccagccatcccattactgggtatatacccaaaggattataaatcatgctgctataaagacacatgcacacatatgtttattgtgacactattcacaatagcaaagacttggaaccaacccaaatgtccatcaatgatagactggattgagaaaatgtggcacatatataccatggaatactatgcagccataaaaaaggatgagttcatgtcctttgtagggacttggatgaagctggaaaccatcattctcaacaaactatctcaaggacaaaaaaccaaacaccgcatgttctcactcataggtgggaattgaacaatgagaacacttggatacaggaaggggaacatcacacaccggggcctgtcgtggggtgggggaaggggggagggaatagcattaggagatctacctaatgttaaatgaggagttaatgggtgccgcacactagcagggcacaggtatatatatgtaacaaacctgcacgttgtacacatgtaccctagaacttaaagtataataataaaaaaaaaaagaaaaaagaataagttagagtggatctcaagagctgtcctgctgtaccttgaagaggaaaaggaagagacggtgcctcttggtgtggggaagacagaacggtcaaccattggagtttcaacagaagttgtgccatccggggaaagtaattcttggttgctttagtcattctaaaatacatcgtggtaccatcttgggttttaataaataaatgctcacccaagataacagtgaatcatttccaaaccttcttacctcaagaggctataatttttatgtatctgacagcaaaacttgttttatagcagagaaagttgtagggggtactgaggttaatgcttatcttttctgggttcctgtaaccatgttctggttcattctttgtaacaaaaattttcagtaaagttgggagcatgtgtcctcataatttctggctcaggatcatgtagaagtgagccacagtgactgaggggaatatatcataatcctcaggtgagctggactggaaaggaggccgagaactactgactgacagtgaagccaggtcaatgggtacttgctgactgtcgcaggctgcatttcaatagagtacgtatggggagtatgtgctaaatcttggccatcattgtatcttcaatagaggagtttataatgtaaagacactgagctggcctaatttaggcattaataccatccttagaaaatgtagcaagaggtcttggaaaatagatgagagtaggaaaaactcagagtgggtagaccatgaggcatgatttcaacagagtaaacggagggatgagtgtggtttggctgatggaaaaacagaggctgtttcctggcaaagctcagagctagagaagagtgagttcatgggcagccaagacacaaatagtagctggaaatagaggtaaagggacaagggagttagaaagtggagagctttacaagtgctgttcagaaatttgcatttgatgtgggagttttaggaagtagagtgatacagccaaagaggccagaaaaaaattattttggaagcagggtatacaacaatttggagtaaataaggaccagtcagagggaaaaacagaagagttccagcagttcaagctcgagaaaactccataaaagatatggagaaagagaagagagtcagtatgaatcacagataagctgctaatttaaaaatcgtgtattttcactgtcaaatgtagaaattagcagcctcctatttgtttcatcactcagatttgcagcatttctcaatgggtttactgtaacctttgtactatccagactgtagtctcataactttttaaatgtttggtttttttcccattttcttttttaggagagattcatgaggaaaaggtaaatgggcagataaagtagttatttaaaagaaaacttataaccggctatgtagtcacttcctaggtgctgtagcaccaagaatcagtttacttttgttgtctgggatcctctgaatcaacctcacaagtcttttaatacactgacatccactaaaaatacttgaattgcggacattttcaaacatacaataaggtggaaagaaaaacttcagcaattatcagcactttgtccattcttatttactgatataaccttttaaatgttaaatgatagaatgaaacgaatgatatgattttgaactacaagagtttatacacctaggagtagacatgggactaaaacaaaatttttttaaagagtttatacacctactttaaaaaatctgtcagtcactaaaagcttaaattatgattcatttttaaaataaagggccaaacaggcatagaaagggaggaaaacagttcctatagtgatttgcaatattttttagcctgatatatttaataatgttcatagcaaatagcttaagtgaattctaagacttcttaaaagagtccccctaaaatagaatatattttaaatcaatcaagaaattacaaattacagaatttagcatgatattctttaatattgaggaagtttggctggtaaattagaatgtaaaatttatcactgaattaaccgtgattaattatctcacccaagataacagtgactcatttacaaaccttcttaagtatttcttaagtatttgaaagtcataagcttgttttaactttatagaataataacatctgtttgaataggacttgcatacatttttaatatattgcttattcattcattccaacattcatgaaccaatattcaaacacttaatatgtgccaagccctgtgttagaggcttggctatatcagtagtttggtatgttaataattcttattagatgactttcaaggtgagatcaattataattttcttttataacaaggggaacattacagataaatgaaattaatggataatccccaagcctcaggttaatcaacctgcagtcaataaataaattggctggtttgtttcagtttttcatgttggttttatcatcacaccagcagttaaatgactaaaaggaatgctgcatatggaagaagaggaaatgcaaggaactagtcagttcctgaacaaatatgaagtatcagatactaatagtcgttgttccaaatgtgaatcatttacatcttttcctgtaactgggtcatcttaactgttgttattgcttttgattcactttgtaatttcatataaattttaaggactgtgataatcatttcagatatatgtctttttatctgatttacctgatctatgtaaaaattacttttccaatctgaagacccagaaagactaagaactggcactccaggtaccgtaaaagggtggaaatttgtgaggctcatcagttggaattgatgccgtgtgccggaacagtactgatgactgatctttggagtgtatgcgtgtctgtgtatatgcatgcatttgactaaaacttgccaaagaagtaacagtccagtattcatgttctcaaggtatgtttgcaactgacagtttaaagcagtaacagcaagaagtgtacagtggcaaagtctgataaatatctatagatttaggttcatctccctttcatctttcttattatataaatgcactgaaaaacacttgaagtagaatgacgtgattgtggagagagagctgaggagggaagcagacagctcagcttgttcctttgtgatggatgtctttgtgagattagggtgaagtttctcattctgatgcgtgcagactgtgcccactacttgtaagacacactgtcagatctccttggaaaaactgagcatatgagtcatttacttgtaaaaacttagtagctctgtgttcttaggaagattaaaaatgagtgtttgacaaatatttttctaaagccaaggttatgaatagaaaggacatggatatgcatttgcatgctgtgtattcatgtacttgtatgccatgctttatagattctaagactcaccttttttacatttcaacatctctgcagttgaaatgcaggttgtaagttatggtgtcttttaattactgtagtccacttttttcaaatgtcaattaacatctctgtaattttcaggcagctcacaatcagtggtatcttagattgcatgacatacagtttatgtctgaatatttataggacactgatacagagagatgagtgtgatacttctcttttacccaaaaaataaagtgagaagatttattctgacaattaatggttgaagtcaagagaaactatttggtcatagaatctcatttactgaataagtaagtcacatacagttgcaaaatgcaacacttatttacagtctctctttatgatcttaagtaatctaaagattaggatgcaaattcactatgtagtttataaagcatgttctttcttatttgattactgcatcactacattttttacatatatataactctttttaacccagatattcatggttttgaaaagaaggtgaaaattatttctgtcctttctgtgtgtgtgtgcatgcgtgtgtgtgtgtgcacgcgcaagaaaacttttacctcatccattcatgcctgcaacaaaacataactatgtgcaggacattaggttaagttaaattgttagagatttacagactgcttaagcaatcttataagattcttaaagcgcaagaaaagatgacttagctctcacttttataagttgaccagtacagaatacagagaaaaagcactatacaatctatagaagccaccgattctagtcctgcggtagaactatgatggatggtttcagatttcaaggctgtttaacaaagttttctagtagatatggctaaatatgaatagatggaatgaatttattattggtctaggtgtccaaggagagacagtagcattcattcaattactgaaagatttattgataatgattattgtatagcaattacaaggaccggcccttaataattctttccacctctgaaattctatatttctagggcttcatgtcagagggcaagttgcctgatcgacctgagggtatctacctgttcaaaaaaaggtcggcactggtggcggggcaggggcaggtggtaagaatacctgtcctgcctccttcccctagactttaatgagataatgcataataaagcattttataaattgtaacatttttataaattcattatgtcttacatgtgaaaaatgtaaatagcccccaaaaatgtaaatgtcttcagaagttatctacttcttccttctggcactttctccagtttaaaagagtctaactgaattttaacacttaataataatgacttgtttgaaacattgtatttgccactagatcaaacattagattgggaggtgaaggaagggtggttctgggagtatctaatatgttgtcagcgttctgggagtgttttttacagtttggaattaggaatcactgatgtcatgatcagtcacattgtcatggcaacatcggaatttcctcatttgccttctcttcacttggggagtatcaatttgccacaggtctgtcatcagttcaccccatgtgttaaacatactagataacccagaactagtcattcttaaagatactcagggtggggaatttttataaactccttaaatatcctatttcagtactcttaactatgtatcctgatgttggaaactttaccttcatacatattcaactgaatagaaattcatttgtaattccatatcttcttatttgaacctttataattcaggggagaatgaaaggcttttcagtattctcatttacataaaggacatcattaattattctagcatcctcctctttaaatgaaatagacctaatttaatggtaattttagcaactgaagagaaaggaaacttactgtttctttccttctgtgtattgaatgctttaaaaccttacttgtgctatccatcttaggttttggatagacattggttatgcaccctctccctacagataattaggaaattcttattaaataaccttttgcaattgttagcttacatgagggttttgtttttcccgggtacagtttgctgttaaagttagctttttactcatgtaaaggacatggtcattccaggtttgaattaattttgtttcccacgatataaagatttttggctccagttttccacaattttttttttaaatttcctaagtactttctgtctcttcccaggtcctagtagcaagagtggatgtgatcagaaattttcccagcacacccattccttccttcctcacctcagctcttgtcttttacccacagtttgctcacatacataggtaattatgttacttccatctctttggagtcagagagacccaagatcaaactccagctctactactgtaatttcagagattacctagtaatatctttccatcacaatttatgagttttactataattcatggaaaattcattgaattaacttgaaatattctgaaaataagcacttacatttttataggcttacaataggcatggagaataacagctccatactagatttgcacaatcagagtatagaagattgagacatcgtccagtcaatttaggaaaacagcaattcacaatatatgaaaaatggaccttctctttgtcttggtatcccaaatagtttacttattttgctgtggaatttgatctatagctacaaattcactgttgtttaagccaaagcaaaatcttgaattttaatttaaatggcattttattcagatgttgtatttttgaaaaggatatgactccatgtacctgtttttatagattttttttttttttttgagacagggtcttgctctgttgcccaggctggagtgcagtggtgcaatctcggctcactgcagcctcagcctcccaggttagttgggctagctaactcaacgatttttttaatagaaaaacttagggacagaaacttatagataacccttatgccaaaaattgctgtcagctttgaatttttattaactattatgccagagcagagcaataactaatttatgaacagattagatcacaaaatgtttataagttatttgtttcaaatttggaggatgtttcttcatagagagatgttgtaaatggtgattaggattttagttgacctaaaataagcatctatgaatctcataacttagctaatatctaatatggtctctcacccttttttgagggaaaataaaacttggttccagttcaggattctggaaataactttcacctaaccaccatctcagccatcctacaatatcccagaagataaatttttctgcttctctcctaactctgtcccaccaatgattccagaaaaaaaaacaaaaaaacaaaaaaactggtttaaagagagaagttataccttagcaaccatcagtgaagtgagatttagatgctaggttggggctgaatatatatacctgtactattcacgatatattcgaatattggaaagtttgcatttatattcagtggaatggaaattcaatgtaaatccacatgcttttacaactgagcaaatgggggcttctagaagggataagtgccttgcccaatgtgacacagatggtaaatggtgaagccaggattcagggtcaggtgttctgatgcccaagctttggctcttaataccatgtaagtttttctctatggggcttggacttgatccatagctaatagtagtaataaccattattaatattattggagacaggggactttggagtcaaagagacccaagatcaaaccccaactctactatgtattggatttgtgaccttgggcaagttactcagttttctctttggtaaaatgggatagtcattcttctgtcctggggtatgtgtgtgtaatgtgcttagaaagtgcctggaatatagttagttactcaataaatgacagctattattatttaatactacatgcagagaagcagcagtgggacaaaactcatttattctgttttgttaaccaggacagaataatcagactatggcttctggtaggactcatcagaatatggctgtgtttgtattgttctctataccttctaggattatagctatagttttattttattacagtggtttcagttttatacgcatgtacttttatacatgtctagggagcctttacgtttggaataagaattgcagattttttaaaaagcaaaatagtaaataatagaaaatgttgctgctactttagaaatagggtactttatcaactctattttgtacgaggaaagaacagaaagaatctgctgaccccctattttttcttctttttttttctcctgttttgctgggagccagaggctttgtgagctcttatacatagactctcaaaagtaaataggttttttttggtgtgaactgcatatactaacctatacagtgtggctatattttatgcattaaaggttgcagtctgatatagtgttgaatgaatttttcctcttaattcctttcacctttcaatttcacccaaataaaaatgggtgcctgaaatggttcaacagcaatagagggatagaacctgctgtaggtcagttcttttcttgatagaggtgttctattcttatctcttggacatcttctctgcccccattttttttccttctttcaaagcttagcttcgccaccatactttctttgtagtaatttcattcaaagcttactcttttatgtggggctcggtaatatgtgtattagggtgttgggtcctctaggacgcctcaccttccccttttaggaagttcatcaattagcaatgatttcagcagtgattaccccaagtctgcattgtccctcatgctagccttctatctgtagttctgtttttctgatcatctgcacaatgcttctttctgagtatccttctaacaaaacatttatacagttgagcttcccacgcccatgttatatccaatattgatctctccctgctgtggactcccatagcacacgattgtctagaacacttgcctggcacttatcacttaatgtcttgcattattagtgtacagcaagcaatttgggcgctctatggtttacaagtactcacctaggaattgaagcatcatcatctataaggctttttttgagatgcggcgttacagagttttagagagcataagacttagtaaatcttttaaccctagccaggtctagattttaatcctagtttgctacttgcttactagctttgtggataggtcacccagccttaactttttttctttcatctgtacattgaggcttataacccttccaacctcaaaggttgttgtgaaagttaaatgagacgtgaaaggtttaaaaatgaaactttcattttaaaattgttgctttgggacaaatgtctttcaaattcaattctctaatttcaggtatatgagctcttttaagtggcagaaggcattattacctatgtgtgtcatctcctattttagattgcaggcttctgcatgtactggtggctgcatccttattattctagttggtatacacctcctggcttatgagagtgatctctgatactgctcacagtcttccaattcattcaaaaatggctcttctccaacacctaacttctttaaaggaaactggacaaaaacagatgaagaaaaacttcagtgcacctaggctcttgaaacagacctttttttagactttcgttttccttttaaagttaaatctgcagtatacacaaccttagaaagaatattcattcagccatttaacagttttttacaaaaatgccctccccttgcctaaatttgcttgtgcttaattcctgctgtacccttgctcctgttctttgatgttcagcatcagttatttgcacagtgcaaccatttaaatctaggcatcaccatgataaaacctggaaaaaaataacaacaactgccatttactgagtttgacacttttgtccatgtactgtacttaagacaattttgtgaggagtctggcactcaagagaggttagcaaacttgcccagagcacaagtgggaagctgaaatatggacccagatctgcttggttctgctttaattctgttccttggattgcaaagtccagattcctttaagctttctgaagaagggtgttttaagtacacatgtggaggggctgttgtaagtcttaagagccaaagcagctctagggactgcagccccctccatcatttcatggccaaatgctcacccactcctggcatgctctactctctgcccgctgccagtaagcttcctgtttactcatagtttctgcttcctcataaccttggcttgcatatggttttggcttgttgtggcctcaactctacccctggcactcttatagttgctggccccttagtaactggttcagccattgaagttttcagaatcaaatccccaagggtgagaattggattggtcctgctcattttttcagtcccagccaggtcataggtcactggcctgtcagttgcccttggatcagattcccacagcttctttacctaccagctgagtgaggtgagggaggaagacataggacagcccaggcagcaaagtctgtttcccttgaaagaggatgagcattggtgaggtgcggtggctcaggcctgtaatcccagaactttgggaggccgagatgggcggatcacgaggtcaagagatcgagaccatcctggccaacatggtgaaacatcatctctactaaaaatacaaaaattagacaggcgtggtggcacacgcctgtagtcccagctactcgggaggctgaggcagaagaatcgctggaacccgagaggcagaggttgcagtgagctgagatcgcgccactgcactgcagcctggtaacagagcgagacttcgtctcaaaaaaaaaagaggatgagcatctctaggacaggttcttccaaagccccgtttttaccatgataacttgcagtctctctggactgttttcttactttctatgtgttagaacatatttgtttcaaaggtcgaggaactttttcagatgaacctcaccaggatctgtccctgtaatcactcttacaactaagcacttatgaataatctataattgagtgtgtatgttatatacagggtctcatagttatgtttttttttcttacgttgcattctttgtgtttgagtgacttcattacattttagattttgttgagggtagacaatctatcttatctctttgtaatgctttacttaagaacacagtacctagttaagtttggaacttttgaaccccggtggacattgtttttttaaaacatatatgccttatattctctccttttatgtcattcaccattatagaacatacattttgttggcttttagatatccttctctagtcttagagtcttttaattttttttttttttttttttttttttgagacggggtctcactctgtcacccagactggggtgcagcggcgtgatctcggctcactgcaagctccgcctcctgggttcacgccattctcctgcctcagcctcctgagtagctgggactacaggcgcccgccactatgcccggctaattttttgtatttttagtagagacggggtttcaccgtgttagcctggatggtctcgagacctcgtgatccgcccgcctcagcctaccaaagtgctgggattacaggcgtgagccaccgtgcccggccagagtctttttaacattcttttagtattcttagtatatcttagtatttagtattagaattcttttagttttctaatttaaatttcatcatcacttaaaaacttttcttatccccataaaactattgcagagtgtatccaatcaaattttagcattctggattgcacagcatccaaaatatcatgaccttagagtacagccatagaaaaattaatctattctcttcttttgtggtttacattgtggtttcctaagagaccactcttgacaactgaggttgtacagggaattttttccatagatgcacagacgacaggtctgagctgctggggtgttgagcagtaagttctcagagaaaggcacctatgacttgaacattctgatgaatgttttctattttatacttgtgcttgataacttgcagtaaagggtcctagtgagaggagacagcaaaagggaagtcaaaacagttgtcttatgcatggagtagcagaaaatagttccaccagatacaccaattttcaatgaatgctcattatactgtgtttgatacttaatcactttaaaggacagatttttacgtaaattttgtctggcaagttcttactcgtccattgtgcacctagcactgtgcccagaataagttactttgcttttttttttttttaatgaaaagaatcaggaattacatgtgtgttttatacggttatttataataggtgaggctttccagttatctggctggagaatgttggaagagcctgagtatggaagaggttcactaagtcaccagcaggatatctaggatgaatattttttccagttccttgctgctagaaaagcctttgaatggccacagctttgccagaagacttcatttccataggggacactgttttccttagggaagccagaaggcatacgccttcactttttagacaagttaggatttttcattatcatggcagatgagcctttccaggaaggtattaagagaccagaaaccaaggaagaactctgtagtatttactgcagcgatagtattctgtaaaagtcaccgtggaacaggccaatgtgaaggatggcaagcccgtcccagtggcttatccagagaccgcaggctctgtcagtccgggctgctgtggaggccttctgcactgcacaggttcggggcttcatacgtccacggaaaggtggtcgagaaaagggacggcttgagcagccgtaggtcatttacatcgggaaacaaagggaagtccctcctccctttgtctcttttttgccgagtttctgtgtcctaagaaaacacatttgtgtcgcatctaataattaacataaggaaggattacactgttccaggttttagggagaaaggtttaccaaaccggtggccttaaatgattttcgctccttgatattatcatcttgaaggaaagctggtaaactctggcttagggataaaacaaaactttaccgatcgtatttgggtgaggggctggggagtggagagctgtttcctctgctaaaattttagcgtgtgaatcgggggatggagatttgcagaggtttgacgggagggtcgtgtgttcgttgaagtaggggtgattgtccacaccttttcttgaagagtggcgcggggggcctagttcgaaaggtgaagaagagagggaagaccgaggtgccagagtggtccccgaagcgacgaccttaaaaggggcttcgagccggggtgcaaagctgccgctggtgcttaggaaagaaccgagggggaaaaagaacagaggaggggggttggctactccgaggaatgtgcggcatgcggggagccagacccaaccattgcaccagagcgggggcgccggctgctccccgggccgcccggccccggctccggccccgatcccgggagggagagcgcgggggccgggcgggcgatggggcggcaggcgccgcgcccagcgggcgggcggggaggcgcgggtgggcctgggcgcggcgcgaggcggtgcgctgccgcctccccgcccccggccggcgcgctctcagggcggtggttgaggccgcggtaggtggggacgcggcggcgctgctcctccgctgccgccgggagagtcggcgacgccgccagctccgcgcgcgaactcccgtccatggcacgcagggcggcggctgcccgagctgctcgagtctcgcccgctgccgcgccgtacttttaggcgagtgcggaggtcgaaggcggaggggaagtcagcgcggagctgcagcccccgccggccgccgccgcgcggcgagagggagttcccagagctgccgcggccccgggcccggccggccacctccttgcgccctccccctcgcggcgaggctgccccgcgcccgcgcccgcgcccgcacccgccgccgccgcccgcagcgatgatcttccccagcagcagtggcaaccccgggggcagcagcaactgccggacgccctatcgcaagcaggtgaggcggcggccgggatgccgcgccgaggtcggcgagccccgcgttacaaagggggccgcgctcaggggctccgcgcctcctcggagggaccggctgggcggtgaccttgtttcccaggaaggcggccgcggggactgctcggccggcgacctgagcaggggagatgccctcgccgccgccgcccgggccgggcagggtgggaagtggaggaaggggcaggggcaggagcggagagccggcgagggcagaagcgcgccgggccgggggcttcacccagctctgcaacaagtttgggtttttcccaaaacctttgtgtgtagcggagtgcggtaataagtcgtcacgctggtgtgcagtcttcgctaggaacctcagagaacctgtctgattcgtaggaaacccggaagacgtgtgtctgtgtgtgtgtgtctgtgtctctgtgtgtgtctgtgtgttcgcgcgcgcccccctcatttaaagaaaaaaaaagagaaagaaacaggaacttctactgtcactttctcaaggttttcagtagcacagggaaatcctgtgacatcctagttgcagaagatacttggatatgcctgagtcatacacatgctctttcctattttaataccgtttcatacattttttaacagattgaactcgaaagccacttcagtggttagatcacaatcccctgctgggaaaaggaatggagctgggagcttatagttgaggccttttgtttttcatctttgtttttaaaagaaggttactgaagccatgttgtgatacatctcacagagcctttcagcagcagcaataacaaaacgtagctttaaattatctaaaaaatgtgcaagtctgtttagaaaaggttaaattgatttagaggtcagtggcaagatgcttgttgagaaaacaaaaacaggattgcagatatttttcctccataataaatctcttgtctgcatccttagccactgagacaaatcaattaagttattatcccaaaaaggatgcaagcgaactgtagccttccatgcagaccgtggctctcttaagatcacgaccgatggcagtgatgcttggtggcttccctttaggtatttacaggattattgattatgtttaggtcttgttgtcgtcagagtcattcttttttgtgtgtatgtcctagcgtaagtgtatttgcaagtattttggcagtgtcgaaaagaaatgttttctgccttctggtctttggttcttttctatgttaacttttctttaaagaggcagtaaacacacaccgtggtctgtgtgcccttgatgtggaagtccatggaacttttacctgggttaagaagttctttcctttaattaattaaataaataaaatctgcatttatgactcggctgaaggatatgctaagatagtcaagattcagaagcaggcatctcgaagtcatttcatgtggcttcatttaaaagaaatgctctcggatccagtacacttacatcaacttcataaatgcagccaatttacaataaacattccccttgcaacccctcctcccccacccacctcactctacctgaaaagatggctaattatgttagggccttgtgtattcatttatttgttgtcaaaacccggcggggtgttagctctgaaatggggaaaaggctctgagggcgaggcctttggctgtgaggggctggaggttttgtgtgtgaaggggggtagcctgctggtctggagcacgctgataagatgctcttcttttcacagggctctccttagattcaaagactaaaagggctgactgaatcagaaaaacaaacagactttcttttttctataggcaaagaaagaaatgaatgtgtaggcattatacagacacaagaccccgggtaccagtggtatttgagtcaaaggtttcttttgttagtatttagccattcactgggaaagcacacttccagcgcggggacctggttaccatgagtgactttgtgatctcatcctggcttagcctaaatgggaagtctaattaatgctttttataagattttgtgatgttaagcttcaaccttgcagttcatattagtttgttcattttgatgaaagaattggcagattttaggtatatgatgcagtttgattttagtctagaaatacataatcagctgttagagctgatctcagctaatttgccagaaaaaaaaaaaatggaatgtaaggaatactttacagtcacctttggaaaaaacaccgtaatggtttggaatcacacttgcattatacatacatagtagtagtagctaactttcattgagtacttcactacctgctgattgctgttctgaatgtttttggcagattaactcatttagtcatcttaaaagccctgtgaggcaggcaatatttgtatatccattttacaattaagaacactgaggcatagattaagcaaattgcccaaagtctattcaactcaaagtgcagagccaggatttgaaccctgacaatcactcccttccaagccaccacactacggctgcctgcctacatgtactgctcaatagcaacccatagagaacttatctgcatcatagcccatcacccttctaatctcagaagtccagtttagggattcctcccacctttttggggagggagaacttgtgagctaggaggtgaatgatgaagcaaatggatgatacagatggtaagtttgtgatgtttggaagcagcattgatataaaaatgtggctgtactgaatgattgtacaactcttaaagctttctacattttacatatacagtcatctctcagcatccgaggaagattggttccaggatggctcaaggtcctgatataaaattgcgtagtatttgtatataacctatgtacatcttctcgtattctttaatctctagattacttataatacctgatactatgtagatgctatgtaaataattgttatactgtattattttcaaattgttttattgctatttttattgcttttccctgaaatatttttaatccacagtaggcggatgcagaacctctttatacggagggtcgactgtgtaggagtgagctagtttcagttaaagcagcggtggttggtactcatctctcacctgcccccacgtagtgtagctagggcatcagggagtactgatctctggcatcatctgggatcaacaggattttcctgcctcacaggcctgtgagcacattagaaatacacctgctcagctcaagtcaaagtgagaagcttttgaatggagtgataaccgagtaggcagtatctaaataaagatgattggttcaagtctcagtggacaaatgtgtacgttctattactgttgactgtgactttgaagtatatggtgttcattaagcaaatccaatctgatcgtatgaaaagagcaccccaaaaaccaaaatgaaaccatttatcaggacttttgtagctatgaaaatattttagtgtgttttgaaacaaaaaaagtgatttatactcaaaggcttttagatatagaaaattggtattttcatttttcctttgtgttgtttcttgaattcttttattagctactcctcttcctgtttccttccattttggaactgctttcttgaggtagctaagttacaaaccaaccatactttggtttctgcacatcgtggcatgtaggaaggccttttttgctaagcagtatgttgtcctagtggtttccagtagggttttggaggtaggggagtgaatgcaaaatttttctgcatgtgtgtatgtgtgtgtttatatctgtgtgtgtttaatggtcttgccctccaatagttgtacttgttaaatgttgctaacttttgatgagggaagtacttatcttcccagtttaagtagatttacatagtttactgccttcttcaagattaactgggtgtagctgcacgtgaggaattcaacagtgattcagtgtttggccttgtttagaggatgacatacaaagctgttgattaatcctcttcaggcagtttctgttcacagcaatttgtgtttagtagattgggttttgttaaagtttgaagattaaacttgtgcatagaagatatttaaatgaacactgcctgaaacagtcccaatttgttgttgttttaaagaaagtaaacgtcttcaagctacagagattggaggtttagtggagagtagcagaaaggtaaattggtatgtataagtaaggtattggcccatttttatgttatgttatctctgtgtatttgtggtcaggtaggatctatgagtcatgatgatgatattttaaaatctacccatacatagccatttgaaaactgtacaattcatcgtgattgtccactttttctactagggaccgttttggcatctcattacatgttccatagttcacttcaggttttgaacatacttctagttttttacttttccttatttttagagattactgtcaactgggctcaccatatattagtacttttatttttgagacctttcttaggagggtaagagtctatctgatccaggtttctgagaatatatttataaagtactcacccaataaataaatattttaaggatgtataaacctcagtcatatttaatcttcatagcatccatatagagaaggtctggagttttgaggcagtgacatcttaagtggcctacatggtgaaagctaggtccctggagtcaagggctgtgtctgctactaggaaaaagaaagcccgtcaagaacagctgtggcctcactacacttccctttacttggcctcccaaagacatgtggcccacagtgtccagatttcagatgtgggaattgtagctcttgaatgtattagtgtttttttgtttgttttataaaggctttcacagatgacatactagacactgagttaaatttgaatttcagataaacagtgaataattttttagtataagtatgtcccagattttcatcacactgcatttttgaatttgctaaatctagcagccctctctcagggaaatccaattcgctttttaaaactcattataaaaaaaatcatgataataagacatactattactttttccactgaaaagtttgccccttagcatattccttaggccctgataacgcacgtttcacattttacctccttgaaccatttggtccatgcttccgcctgcactctacctaattgaaagactatggcttaagttgtggctctaccatttgcatgctttttcacttaacctccctaagtctgagtttctgctaagtaaagataatagtgcccacttcacagggtagttgttaatccttctaaggtgctattattaatgtccccacagagcaagcaacagcgggtggtcctaggagacttctgtgtggtctagggagaccttgacacagtcgcctaagaatggaccgtgtttacagcctctaagaatggactgtgtttagaatgaggggcagcctgaaaaagggtaaggacctgaggttgaaaatgaaattctcaaccacatttttttaaaaaaagaaagtaccaagaagtagaaaagtggatcccaccatatttttaaacagttggtcatggtttatgccctcgatagcagaatttgcttcctctctggggaagactttcaatcctttcttctttatttcatgcaaatatattaggaaggtaaaaagagcattgatcattcttatcagtgaaaaatgctactttttaatttgctggaaaacaggtttgattattagtatatgcacaattatttcctgaattctttcctttgtcttgtttgtgtatttgattttcaaagatatcgtctttgcattactcagaaaaataaacattttttttgtccttggacatctgtaggtgtttagtgggtgtttgtttttaaactcgcatctgtacagaatgctttgcttaacacattctaaaatcttggtgtaaactttaaaatagtatagaacacactgtgaggaaaggaagaaagcatttcctggaattaggataaggtgaaagaattaaatggagcaaatgaaatcctggactaaaataaaaaatcaatataactgttgggacttaacacttaatataacgacagcagcagcaagaaacttggtgttacacagaacagtaccctaatacatagaaatctatgttggctccactttattcatttaaacatatggaatttcataacagtgtaatgtaaactagagaagattatcttttgtttgtcaattgtatatgcaatacaatctcaaaaatgtatttttaaaaactggaaggaaatatgccaaaatattaacaaatggcttcctctgctatagaatcacaaatgactgttttttatgatcctttacatttttttcaaccatccagtctctcttgtcccccacaatgagcatgcagtcctttggctatcaagaaaaagacagtgaaaaaacaaaacaaaacgaaacctagaaaattgtattttttaaatgtctcaaaattgtggtgaaattgcaaagaattcattttgagaatttcaatcacgcatgaaggtactgcttgtttctaatgcctgagttttgaggggtggtcctttcctattctttatgtattatttttgtttcctgcaaactcctgtcctacctttttagaaatcacttgtttctgacagatactttttaacttaataacttaaaattttcctattttttatacatattttaaatatgccttctgtactttttgaaacatttttaaggcacaaatttatgtacatgagttagtgagggggaaacgtagctatatatatgaaatttcatattctagattacttttcaggagagtagctgttctaaatattctaaatatagaggcattatcacaatcacctgttttcatttgacttacagctgttttgtggacagataaattttctccacatttaatttctgtattaaatgtgacaagccaagactgtcctacctatgttggaatcctttgggtttattttattatgaatacatatgattgtcttcattgcaaacttgctttttggctcttagcttcttttttttttttcctcatatatatgtttgtatttttcattttgtttctttcgttttttaaatttaatttaatttaatttccagttccgagatacatgtgcaagcttttccctttttgaaagggccgtgcagtgggaggtgtggcttctttagaggtttctttaatgtataatggaagagtaaggatttctgtaagaagtacaaggtacagataatgtcagcattgtagaagcagctgttagtgtataacccaggggagttttcagtgtgtctggggagttttaggtgtgcactgcagaggctgcaaagctccagagcaagatggggaggagcagggagtgctgaagagagggaaggggaagtaggggctaagagagaagaaagcactcttaccttgtttgtttcttactttgctagttgatgtatcactttgcaaaattggttccagtctcattgttttggtgctgtgtaggttgggagcaaatatgtagcctcattgttttgaattgtcttagattcttaaatctccccctttttttcttagttatcggtcctatcgtccagcattttctttctctgttctaagacaaaatctctttgtctctctcctctttggagaactgcctataaatcctttttggaagaccatttgtgatcaacccaaccctgccaattcagatattctagaaagtactttggctctattttgtattctcagttttatatgttaaatgtatcagaccaattctaagacagtgaatagttcttttgtttaaactgaaagtttaagaggggctcagaaacattgagttataattaattgagttgtaggtgtaagtgatttaaaaaaaaaaaaagcatacaggaatctttgcgaagtaaactggtggcatgcaggagataatactggtgcacattaggggagaaactgggcagggaaaccagctagctagttgttaaaactgctgagagctagtgaggacccaaaagaagtcagttaaattgtaggcaggaggagtgaccaaattttatagatactgaaatacaggaagcccttaaaattgtatgcaaaatgtgcatacattggctgtttctttggtagagattcatagctttcatccatttgtcagagggatctgtgtcctccaaaagttctcgtgactgcatttggaaggagagggagaagaacttgaacaaaatttctaactcaggagacaggataattggttgcatcatggaaggcgacatttcaggtaaaaagaacattgattcagcaaagatttgaagatagaaaacatgggctttatcagggaagtagtgggtagttcaggttaggttgactgcagggtagagtttgaagaacagaggtcaataggagcaagcttgctaaaatgggtgagagcagagcctgagtttagaaggtattgtctcagttgaaataaagatgtaaaatgtggcagtgtgaatgtattaaatagaatggattcaagatattgtgtagaaagaattgacaagatttggctggtgactggctggatggggaggggaaggtctcgggaatagaccatcgtaggcttctagtcgtaaatgattgggaaaatgaaaagttactgcaaccttttttgctctggggctcagtgatgaggaaaaacccagcctttctattacaaggattttccacatcatcatcatcattattattattactgttattattttgctattaaaataaattggagagggattgttgaattctgatactggtgtccagacaccagggatacttaatatcctgcagtgtccagctcagtttctcataaggaagaatcgtccagcctaaatggctaatcacacacccctagtgaaaaccactttaagaagttattttggttggggagatggttgtaagcatttctttaccactcccttgagattaccttgaagtcagagtagaagctgcctcacatgtctgcatggattttcgtgtttgtcctggatcttctcaaacacattgttatatggcaaatttcattcttggtaatatacgtcattcataattatacagtcacctttaatatctatagtctaacaagtacattggttatattaaaacatctcccacctcaaaggaatatggaagatgggcagatatagtggtgagtggtttagagtattcagcctaccaaaataagagtttctgggggaaaggcagtgagtttggtttggccattttaacttgtccacatgaattacacattattcttcccacttgccatcccaggcagaaatttctagcaagcagttagagaaccggagctctggggaagaagcacagaaacttctcagatttaataggtggagcattgggaatggattaaagcactccgaggagagaatgtgtcaagacaagagatgggacagacttcggggagcacagattctatattgggcaggagtaggggggagccttaggcaaagtaggaggaaagaagtggcacaaaactgagagaatccggagagtgtcacagaagccaaggagaacaaagttttaagaagaggtggtcagctccattaaatgttgccaagaggtcaagaaagacaaaagcctagtaaagggccattggaaatacccattgggaggtctttgtaaacttttaaaacagaagtctcagtggagtcctgtgtgtgtagtggggcgggaaaggagggtggaggcaggggtgagggaagcacattccaaagggtttaaagagtgaatgaatgaagagggtgtgtctttaggaaagtcagacgccaaagagagtttttttcctgaaaatttcaagtgacagcctagagacaagattatttcagcatctgtgtttgtaggtaaagcaaggtgctagaaaaaagagggaatatttggaaatagggcttacttttatgaaaggttgaggcaggattagtcttacaggaaagggctcctcagaagtcttcctgacagtgattacaggaaggagaaaatgggttatgctagagaaggcaggaaggccagtgaagctcacctttttatgaaagcttaggattcagtaaggaggcgaggttgtctgttcagattctataaaataaaaaagatgggattttcagtttaaggagtatgacaaaagatttggaataatgctcttgggaatttggtgagcattcaaacagaaatgagtgcaaggatgactcaagcagtagtaaggagccatgggagttcagaggtacgagttggcatggtatcctgaccctccacgagcaataagtaagggaaagcatctggataatgggtttatatagggtttgacattggtaagatgagtatgctctgaaaattgagagcactgttccaaaggctaaggaaacgtgaaatcaagaaagacaatgagcttttggtatagggtggggcatggagattctgataagatccttccgcctaggggaaagtccccggacctcggtcagagagtgccacgtgcatgcgcaggtagacattccctacggctgggcgcggtggctcacgcctgtaatcccagcactttgggagtccgaggtgggcggattacgaggtcaggagttcgagaccagcctgaccaacatggtgaaaccccgtctctactaaaaatacaaaaatcagccgggcttggtggcgcctgcctgtatcccagccactcaggaggctgaggcaggagaattgcttgaacccgggaggcggaggttgcagtgagctgagatggtgccactgtactccagcctaggcaacagagtgagacttccttcatctcaaaaaaaaaaaaaaaaaaaaaaaaaaaaagataaaaagaaaagtccctgggagagagaggtgaaacaggctgcttcagagaggaagttctgaggtaaaagccttgaaggtagaatagtcctgggatccttccttgtggagttgtttggaggattaaatgagatagtacatatgggtctgtctggcacctagtaagaactgaggtggttgtaattattaagatgaagttcttgtataaattacacctccctctaactactgttgtaatatttgtgtaaatcaaatcatatttcaaacagattccacaaaccatgaaacacaaaccaaaataaagtgttaatttttttcaactgaaccacatggccaacgtccatttaaaaaaatttcactatcaaaccatttcaaaacacaggttgcttttaaagaaaaaaagttggacattggtgtggatcccagctcttatcactcgaagggacatttcttaaactttctgggtcttaatttccttggcagcaaaaccaggggtaatagttactcagtgttattgagatgattacatgacatcatctgggtgacagcacgtggcacattacctggcacaggtactctggatgcttccctccttccttggggtgtctcctaacaggtcagtttgtatacaaaagaggattttggaggaagggtcaaggaaagcctacggttataatcgtggaagaaaattgtgatcattctgttcactagccgaaaatccttgtgatgagaaagacttgtgaggattattatatttgtccttgcttctcagggttaagggtcaaaagagttaatgtaagataaagtgctttatgatatgtaaacactatggagatgttattacagtttctgaaatagatgccctcgactattatgtgagcattttccttctttcagcatctgatttttttttttttttttttttttgagacggagtctcgctgtgtcacccaggctggagtgcagtggcgcgatctcagctcactgcaagctccgcctcccgggttcacgccattctcctgcctcagcctcccaagtagctaggactgcaggcgcccgccaccacgcccggctaattttttgtatttttagtagagacggggtttcaccgtgttagccaggatggtctcgatctcctgaccgcgtgatctgcccgcctcggcctcccaaagtgctgggattacaggcgtgagccactgcgcccggccttcagcatctgattttaaattcagaagtttattgttcaaagctgctttccttaattgtgcttactaagatacacggattctattaaaggttgaaagtgttcaaggaattaaaatactcattttacaaagaaacttcggaaacactacatactatgtagtattgtccaggagagtaaaagtgtaaattagcagtaaaaagtcttcaagaagtcctacagtggagatatttgtctgacttcatgatttgttttcctagaattacttgatcatggaataatttagttttagaatatttactaattgtgttcttggaacagtttgggaaccacttatttaaaagaagcttttgcattttagtgttggaaaggacattagagattatcgggttcaacccctttaatttactcctaaataattaaaatccagaaacattgagtgatttgtttaaattctcacagcttgaaaagctggatcttctgacttttacttagtgcttcaccatcctaccttaaaatctttgtttttctaagtatggcacacacttgcactaatgtttttctaatgaatgttaaagagtgtatctttttaaaaaatcattgatagaacttcagaattgcttttatgtgaggtttaaaaagtcattctctgaacagagtaggcctttagcaatagtaagttgcatgttaacttcaggcaaaataaactagtatctgccaactctcatttctttttttgcttttaatttctcctctgttaaggtcagtttttccacctgttttattgctttttaaagcatttacaaagtcaagaaagctgacttgagaaatcaatctagtttaaaatgtcagtgatctggaaaactcacacattctaataatgaatattcttttgtcctctaaatttgttttgtctttctcatataattggctgtgggtagaaaaatttgcatactttcagtcccttcctgcctgacttattacagcatgcagaatttactctgtggtttctaggtgtaagttcctgtatagaagaaaccacagttaggactttacaaccctactgtggagaaggctcgtctgtgaggaacacactgctgtgtgttcttgaaaattctgaatggccacttgatcatcctttgttataataggtaatctagactaaattgttcacttgtaccatctaaaaaaaaatctatattaaggttcttagttgcatagtccaacgaaaagtgggtggaagtctgtcggtctccctcaccaactgtttctggtgtctacaacatgaaattttatcctgaatgaattctgcgatgtgatactagtgtttcggatgaagtgatctgaaggaatgttcagtatataatgtgttattacaaaagaagtgtagtatactaggccaaaaggacccagagatgagcttttcccagtacttattttagaggtgaggacatcgcatagcttatttgtaacaaaaccaggactagaacccagagatcctgactgccagtgaagcttggctattttctttttttttctttttcttgttttcttttctttttttttttttggagatggagtctctcttgttgtccaggctggagtgcaatggcgtgatctcagctcatcacagcctccgcctcccagattcaagtgcgtctcctgcctcagcctcccgagtagctgggattacagacatgtgccaccacacccggctaattttgtatttttagtggagacgaagtttctctttgttggtcaggctggtctcaaactcccgacctcggtgctctgcccgcctcggcctcccaaagttgctaggattacaggtgtgagccaccgcgcccggccagcttggccattttcaaccaaattcagcttggattatcattcattcagtcaatattttagagtacattatgggccaagaactgtgttaggccctgagggcaataacaaattagtaatcctgttgtcaaccttacagtctaagagagagtatggagcaagtgtataaataactatataagttagaaattagtgccataagagcttcagatatttaagaaatgcctagtaagaacatgtctgatttgcagctgacatgctacagtttacctgaattttgaccatttttcttccaggtgcatttgatttgtttcctgtatagaaacagagttctcaatgggctgttttgtgttgattgtcaccttagagttagtctaccctttaactgactctatgaaactgcttattaggatactaaattagaatagggaaaaaaaggaaatatatcttccatgttcttgacatcaattcattgccgagtttggttttatctctttaaaaggggtgcagaaaaactggcgagcattaagagaaatttaagcaaaaaagaaggtagtatttaacattctaagaggtcctttctctctctctttttttttcttgagacagggtcttgctctgttgcccgggctggagtgtggtgcagtggtgcaatcatgtcttattgcagcctcaacctcccaagctggagcaatcctcccaccttagccacccaaatagctgggaccgcaggcacacaccaccacatgcagttaattttttaattttttgtagagataagatctcactatgttgcccagagtggtcttgagccactctgagcttaagcagttctcccaccttgacttcccaaagtgctagaatgcccttcctctttttattgttctctagtgaaatgtgtgaaataggattggaaaatagtactaatggaattgggattattgacaatcgagagaaacaagcaataaaggtttacgtgggaactgctcatatatttcatacactatctatagttgggatcagggtttttttttttttgtgaagggccagatagtaaatattttaagctttgtaggccataaggtctctgtcacaattactcagcactgcctttgtaactggaaagcagccatagataatatataaacaaatgggcatggttgtgtttcaataaaactttaaatacaaaagccagctgcaggcagtgtttgaccggcagaccatagtttgcagacccctgatgtgtaggatccttctttgttgacacttttaccagaagatgcacagaaggacttgaaagaaaatgaaacccaaaccagatagtacttattagcaccatcagtataggtaggtacaaaataaaaccaagtgaaggtaggtctgattcataggtttggttaaaaggttttggattaagagctcaatcttgactagatagttcttttgcttggttttatttggggaagcatccttcacatatctgtgtaatcgttactacattggttattatttaattaattaatttggtttttttttttggagatggagtctccctctgcgccccaggctgtagtgcagtggtgcgatctcagctcggtgcaacctccgcctccctgcctcagcctcccgagtagctgagactacaagcatgtgccaccacgcccggctaatttttgtatttttagtggagacagggtttcgccatgttggccaggctgctctcgaactcctgacctcaggtggtctgcccatcttggcttcccaaagtgctgggattacaggcatgagccactgtgcccagccctacattggttatttttgttttgaatccctaagacttatccataattctgaagtggtgagacagaaggccatggtaaaatagtaattgcatcatggaagcaaaatattaatgtttttcttttaaaaatattttatggcaaaatgtgtgttttactagtcaacaggacaacctggcccaagcagactaccgaagcacctgagtattagtttgctagggctgctataacaaagttctacaaactgtgtttcttaaacacagaaactaattttctcagttttggaggctagcattctgagttcaaggtgtcagcagggccatgctccctctgaaggtgccagggaaggatccattccaggcttctctcttagcttctagtagttgacttgtggcaacataactcgtcttcacatgacattctgtctgtgtgcctgcctgtctgtgtgcctgcctgtctgtgtccaaacttctcattttaataaggctaccagtcatactagattagggcctcattttaacttgatttcctctgtaaaaaccctgtctccaaataaggtcacattccaaggtaccgggggttaggactccagtctgtcttcttgggtgcatacaattcaccccataacaatgtggtaccagagacattcaatttaggcaaaattcatcaactgggcacgttgttggacctgaaataaatgcaaaatacttcatgactcacttgtggtcacattagcttccatagcagaagtattatattggtggctctgttgtacataatgtatatggaaatgttattttttttttttggtggttgtttttaacttgcagttagaagatatttctttacagaaatattaatagcttaaatatgttaatggctatggcaatgtccatagccttcaaggatcctgagtgactgcccctttcttcccatcctctgctttgtgcaagttcatacctgccattccagccaaaagttcctcgttgctttttttttttttttttttttgagactgggtctcagcccaggctggagtgcagtggcatgcacatggctcactgcagcctcaacctcctgggcttaagcggtcttcccacctcagccttctgtgtagctggggccacaggcgtgtgccaccacactcggctaattaaaaaaaaatttttttcatagtgacaaggtcttaccatgctgcccacactgatctcaaacttctggcctcaagtgatcctcctgccttggccttccgaagtgttgagattacaggcatgagccatcagtcttgagcccttcctttctttctgaagtctttccttcctctcctccaagcttttgttaggctatcacaactggccacagaactacagcgtcctatcttcaagtttgtgtccctctcttctttaagttgaaattcaaggtctacctcttccaggcagatgatctcttttttttcctaaagttcctgctctttattacattagaacaattctgatgtgatgggtttcatccaccacatctcacttggggtgtgtaagtgggtggagtggaaaagcaataatgcctgttgtcttgagaaagggatgggttgcaccactacccattaaggtatcaggttacctctagggaatgggagtgagttcttgtaatattcttgcccatttgtaagattgttttgaaagctattacagagctgcaattctgtaagaatatgaagtagcattaaaacttaagtttcttgagtcttatgtaagaatttaaagatgtacatatgttttattagaggggcctctctttagtttttctcaaccttcaggtttttggtaaaattttcctctcctcccctccccaccagaatacaggggacacatcttagatggattgattgaaaaaaaaaaaaaactagtaattttcattataaaaggattcctcattatgtgattgttggttaattactgagggttttttgccttttttttttttttttttttttttttttttgagacaagagtcttgctctgttgcctaggctggaatgcagtggtgcaaacttggctcactgcaacctccacctcctgggttcaagcgattctcctgcctcagcctcctgagtagctgggactacaggtgtgcgccaccccgcctggctaatttttgtatttttagtagagatggggttttgccatgttggctaggctggttttgaactcctgacctcaggtgatccacctgccttggcctcccgaagtgctggcattacaggcatgagccaccacgcccatcctgctgagttgttttttaagcttttgtttaggtatgtttatcattaccagctagattgtttaatatctttgagcactggaacctctctttgtaacaatagcatttatgtatttcatgcatattttgcagggcacagcattttctggtatttttctcaggctttctttaaaaattgtgtttcctcatcacatttaaaacatggatttgctcatatcaaatttttccagaacacatccagggtgtgaagttaggtatacttatcggtcattatctcagcaagaattgtcagtgtgtgacagtgctctgtgtcagggatgcgcctagaggtgctccaccctttctgattaaaatgaggtcgttgggttgaccaggacagctgttttctgaaatttttgccacaaacaatcacgtcaactaaagtaaggatggagacagtttgtgagatgagcacatgtggaaattactctatgcctgaataggaacagaaagatctggcctgtcactgtgtgggtgtatgctgtggaaggcctccccccagggggattcatcccagcaatttgtttatcccaataaagtttgtagacctgttaacctaggaactccctacatgtcaattagaggagccatgaaaacctctcgcatcgcagggagggttggttagaagtgtcagttcagggaaccggaaattgcttggctcagctgacacaaaagaggatctgaagggtgcgggcagagagcaggcagttttagaaccaggagacgccttttcctgctggggagtgacaagtcaagtgtcatttggaagagttgaaaggtggactctgtgtggagcaagggacaagatggggctgctttgggagtgacacggacccagagctagagtgcccagaagattccgattagctgtggaatcccgtggagtagcccttccagcttagcaggggcactgggtctctgaatttcaaagacttgctgtcttggttttacccctcaccgtaccacctgcatcagaaactcttggggtgctcattaaaaatgtaaaccattgggtccctctgtcgccggcaaaaacaatgtggggggcattttaggctatctgggttacctggaatctcactgaaggctaaggaccactgggtgaattattcctcaaagagcggttgctctgtgtgtttgaacctttcagtgatgagaaatgaactgtcttctaaagcagtgatcttttaagtctggggtgatgcaggcaggaaatgtaaatgggtgccaaataagagaatgacagtcttatgagtaactgagttaaaattgagtccaaagaaaaattgggatactttgcttaggattgacgtcagaaaagctaacagcacatgttagttggaaccctgtttggctgtagtaccggagcagctggactgatgcatgagagccattctgagttcctctaggacactggaaatagtttcagaggtcagcctgtggacatgctgagccagctaagatgccagggccaggcataaacctctgggttcagatgaagctctctgaaatctaggataaggaaaagctttttcttttctttttttttttcctgtctaatgtctgccatataatttttaaagtaactgcctgatggggtggcagtgtatgcatttgcacattatggggtgggaggatctgtgtgttttgtgggggaggctgtcacaaaaaggagagattcctgagcatatattgagcccaaatactgtgagcaatgagaatgagtttccattttctttctttttgttgacccttttcctcaccctctctgctgtacacagagtaggaaagactgtcatttgcagcacagacagaaaatgttccagggcttgtgccattgcagaaaccccttcctcccctgaaactggtcagctgtctaatcagagaggcacccagaccacgacgtggctcctctccctgcctctgcttgttcaggcaccatccctaaaacctgccagttaatgctacctttaggaaaaaacatttagtgattaaaagctcttgctaaaatgtggagatttacccaattcttattcatccctcctaagggaagactgcaaaaaaaaaaaatcattaaaataaaaagactagatactgtaatgtaatctcacttgcctcagtcttttcccatttactagcatcaccgcatccccagctgctgcagctaataacattttgaaatttttaacttctatactgacaaccatatatagggctattgaacagctagaggggaaagcagccaggaatatcaaggggtggggacagtcttagaatttgataaacagacagtgtcctgtgatcaaattggttgaaagcagcaacttgtacaccatgtagaaaacatgcttcccagttcttcagctgacacctagctaggaggagtggtgatgtacacaaaataacagtagcttccagaaagcggcacactggaaggtaagcccacgtttgtaataggaataaataatcataaaatcctgcatttctgtgaaaaatactgagggaattctagtatgactaggtgtataaaaagacctgaatggttgatgtcttagttcaggccgctctaacaaagtagactaggtggcttatcaacaacagaaatctatttgtcacagttctggaggctggaagtctgagatcagggtgccaacatgatcgggttctggtgagggctctcttctgggtggtagactgctgactgctgtattttcatgtggcagagagagccatagggttctctggggtatgtttttataagggcagtaatcctattcatgagggctccatctttatgacctaaatcaccttccaaaggccacatctttttttttttttttgagatggagtctcactctgtctcccaggctggagtgcaatagcacgatctcagctctcagcactgcaacctccgcctcctgggttcaagtgattctcctgcctcaacctcctgaatagctgggattacaggcacgcgccaccatgcctggctaagttttgtatttttagtaaagacggtgtttcactgtgttggtcaggctggtctcgaactcttgacctcgtgatccacctgcctcagcctcccaaagtgttgggattacaggcgtgagccactgtgcctggccaaggccccaccttctatactattacattaggggttaggatttcaacaaatgaactttaggaggacataaacattcaattcaaagtatttggtttgactataaatgagtattagccaacaaattaatttagctgcttacgcccttagcatagttttacctatattaataaaattatgatattttgattaagaaatgaaatcatcatactacctagacaaataaattctagttcagaagttctttcagtttggctttttgaagtcagaacacatgtttttgtgtgtagaaacattataccatgtttggaagccaggttcctaggtttcccaggttaccacagaaacccagcctttcagtggacgtttcgaaccaatatagccagcatccattctgagtctcttgtgagcgcaggtttgtcatgtggtacatagatagaggaagagtatcttccttgcatctaataatcttaccaaaaaatgtagatgggatgatcttttgcattctcttctctctgtgaagcttgagaataataaaagggaggcaccccgaacagaacacgtgggcatctctacattcccttcctgatgctcttctcagttgtcctaagtgatgagcatttcatcacgtcacatcctggaagttttgagattttaaagtggggccctgacccaaatgcctctctctttagagtttcagatgataaaacaatctcaagtgacaaaatcccagaacaatgacagtctggaacaggccaggccttccagggacctcttctggggaagtggctctcccagcttcacctgcctgttacttttgaacctaggggtttttgttgttgttgttttagttagctttctctctctcttttttattttttatttatttatttttttatgaggctgtgcaaagaagcctccaagcccctgagtaggacgagggggatcgagaagctctttatatgtataggctgattttaaggttagaactggtcatgtgtgccctcggcggagccctcctggatatcaggaaataaaatttagagatgaacattgtgttagtctgttggtggttctataaagaaatatccaaggctgggtagtttataaagaaagagatctaattggcacatggttctgcaggctgtacaggaggcatggcaccaccatctgcttggcttcaagtcaggcctcagagagcttacagtcatggcagaagacagagtgggagcagatgtgtcacatggcaagagagggagcaagagagagagagggaaaggccacacacttttaaacaaccggatctcagagtgagaactcactcatcaccaggggatggtgttaagccactcatgagggatctgccacatgattcaaaccccccaccaggtcccaccttcaacagtggggatcacatttcagtgtgagatttggagggacacaaatctaaaccatatcagacattgagaaagatggactcaagtgtaggtagcagttactgagcacttcttacaagcccgacagtttattaattagcttgtgtaatctttacaacaacactgcgagctagtatggaatagatggtatcctcctcctcactgtacagatgaagagatgagacttggaagctttaaatgctttgcccaaggtcacctagttagtgagtgaccatggtgggatatgaactgtaatttcagaatccatcctttcattcctaattgctgtactgcctccttagaagttgcccaagccaaagaaattgtttggttattgtttgttttgaggtttagaggaatattattgggggataatagttatcactaaagatttaaagttggttaaaagaaggggagactagacttgttctatgttgtagcagttagaaatgttttagaaataaattgggacatctgctgttttctaatgacattttaaatttcttaaatttacccccaccccaaatctctatgctataggtaaaattctatgccataaagaaaattcaattttttttcatttaaaaaatgacatttaaagtttttatttatttatttatttattttgagacagagtctcgctccctcgcccaggctggagtgcggtggcacgatcttggctcactgcaagctccgcctcccaggttcacaccattctcctgcctcagcctccctagtagctgggactacaggcacctgccaccacgcctggctaattttttgtatttttagtagagacggggtttcactgtgttagccaggatggtctcgatctcctgaccttgtgatctgcctgcctcggtctcccaaagtgctgggattacaggcgtgagccactgcacccgaccttaagtttttatttatttactccatccccaatctctatgccttaaagaaaattcctactttggatatgagactggacaagatgacctattagttgttatctggatctaaatatggttaaagaactcattggtattacaacgtagtggctgcttctgtaaaataattctctgtatgtgctctgattacatagctcgctataccaccatagaatgactatagttaacaataatgtatagtttcaaatagctagaaggaggatattgaatattcataacacaaataaatgatagaggtttgagatgatagatatgctaattaccctgatctgattactacacattgtatgtactgaaacatcactaagtactccatcattttgtatacttattatttgtctattttttaaaaataaaatagtcctttagagaaagccactgtagtgggtcagttcccccccccccaattcatgtctaaccagaaccccagaatgtaaccttatttggaaatagggtggttgtaattaattaattacaggtagaattaattaaggatcttgagatgaccagtgaccattgactggtgtcctttcaagaagaggataggatgcagagagaaggccacgtgaagatggaggttgatattggtattctgccgtcacaaggcaaggaacagcaggagtcgctactggaagaggcaaggaaggcttctcccttacagctttcagggggaatgttaacctgctaacaccctaattgcagacttctgttttcctgaattgggagagaatgcatttctgttgttttaatctacccagttcgtagtaattggttacagcatcccttggaaactaacagccactttccactctctccattgatatttcatcttaaattttggaataggttcatgtccatgtacagtgttgtagttactgtataaatcgtacattttacgtttcctgacaggagccaatcacatttaaattgtattaggatggctctacatgtgaactgaatgttttaaagagatgaaatgcattttaaggagtagctttttaaaaaaaaaaaaattaagtaaactacgttagtgttgtggggtgggagtgttgtgattcttctgaaagaattttatcaaaccacccagatgactctattaacaagttagtcctctaacgaactctctcacacttctctaaggttaaaaatcaattagaaggattggagtgaaggtgtcatttttcagttgaaagtctaataaagcaaatcctggaaagaatgaataacaactgcctgaccagatgtggccattaccaaaggcaggaggatcccaaagtgattacatcttcttgaaggtttatagtaattctgattaatctgttttgaaaagacagatacccatataccccatgtatgcaaaggtaataagattattaggactcaaatttttttctgaattataattcttgctatcagtcataatttgtctactgtccctggtgttttgaaatctaaactaggaattttaaaagtccacctgtcatggagttgggaaattgttctggagatgctttagtctggagaggaaatataataaatttcaagtgaaagattctgtttcagtgaggaaaatgatatgattaatgcatttctccccagatttcagactcctttctaagatacttaggttccaccaccatctagcccttgccaacttcacccacctccttatacgctggaggtgttcaacatataacattttaatcactgcagcagcttcatggtttctaacataatgttaatctatgttccttcaccaaacacataaagcttagtccaggctctaagacatagggtgggattactaggcagggcctggtcccttatcctgcaggggttgacaggctggtaggggagatttgttctttaatccaaatgtagaaacaccatttagaaagtactgactttttgttgagttgaaatatcatatattgggatctaaaggaaagcaggtttcctgaatgttttctagcaataatccttcacagtaatgctgtgctgttggtattagaggaaggaaggaaggccgtgtcactcagttgtactgttttgcaaccagtttcttgagccaaaccttttggttatgttttattggaagatgtttagtaaccatgacatagatataccattcgtagcaaaggtcagtttctctaaaagcctcatagagtagttctctatcaaacaaagcccccagtatggtgaaactgaatggcatatgcctccttcactcccattttctcttccactcagctcctgaagaggttgtcgactgatctttcacaacctgactgctacctcctcggtgaccttggggaactcccttttctgttctcttatctgtaaactgaatgaagaatgcatttagcttgatgccaaaaacagagtaaatgctcaataatgttagcaattagtattatgcgtaacacttagttctctggggaaaaaatattttccagaaattgtcatgctttgggtttttcctctttagtttttgcttattaaactatttttaaggactgcctaggttattttgatagtaacaaaaagataaaatattatagatccatttttacccattttactaaaatgggtaaaaagagagctaaacctatccccctattaagggaaaacattgttcccagtgttttatctatttctaggatgactgctatccaggatttgcatatgagctattattgtaagggaagattgaattttgcaattagggagaacagagatgaagttagttagagtctataaggcagaccaagtttctacatgtattcctggggagagcagaatgagataacctctccaggattttatggataagttctcactgcaatatttacaatttatatattaatttaaaaaaacatatccaggcaggattaaactgtcctgcagatttttatcttcatttaatttgctttgtgatggaagttcttctaaaggtaggatgatgttttaatttgagcaatttttatgtaactggagcaactactgggttgcggggaagagcagagtggctgccaccgttccctgccacgagggtgtgggtggacttccccagcttcctggccgcagtggagaaaaggaagcttgtctattccttcctaaattgttttccatactagaagttatcatgcttggttccgatctttaccagaaacaaaacaacaacaacaacaaaccaccatttctcttaatgcattctttttgctctgctctaagatttaaactgttagatccgaagacttgaattttaggaatatgtgaagttgtctttttaaagaaatataaattttaaaactgtttgtgtatcctcttcctgcattttttcttttttagcaaaatgatttgatatcgtacggggcgctctgaagtttccatgctactgcttttttctgtttacttcgctttgaggtcctggcgtagctgcaggccacacctagaatgctgttcctgtctgccctgtcctctgggcaggggtccaccatagtgtttctccatgtttgggctctagtctgtttttccctttcctgttctggaaagcccactggtggctttggcttaggtgggggtgggcagagagctgctccccgtcactagtcattgagtgtgaggctcctgaagccagtttccacttaggcatcattttcttcataaatgtgtttctctgtggtgagtgaggagagatggtgtcattttcttattttgtgcatttagaaaggctgagatttacaaaactcattttgggtactcgtcactaattagtttaatctgggataacaatggaaaatgaaagattgcatgtttgatcatgcacagcaaagaaaaaagatttataatgaaactaaatatcatgaaagaagagaaggatcagaaaactcaagtgtaggaactgagttctgtgttgcccactgatctccacacccagcccccaaacacacagaggtcctgggtctctgttctagaggccagaactttatgttgtccgaggttctttggaaaagaaattttctttgacattttcaataactagcaatgtgcacattttggtaaaagagatgaaatgatgctttatgattagctttagcaacagaaaagtaaaaaggtgcagagaaagactaatatcttcactttttttcttgttgagcaataacttcctactccaaatagaatattgtgaaataattttaaaacgaaaagaaaaaatgttgcatccgatttctgtaaacattgaaagcatttcccagatcctgcttaccacagaatgacgttctacttcaatttatctgcttcagaagagatgaagagaggaatgaggcttgccagcatttggtttggttagctcccagggcacctatgtattcccaggttgataccatcaccactaaagtgattagacaatagtgcatgggctgactccataaaacagaggaaagtctcagggctgttgttagcagtagatactcagtccaaatatgcagtatcattaaatagaaatttcacctgaaataaactttgtccctgtaaaaatgggaaaatgcttaggtcaaattagaaacagcccttcagagtataatggtgggctgctggaagcaaggttcacattaacttttttttttttttttaagacaggttcttcctctattgccccccaagctggggtgcaatggtgcacactctgatcactgcaacctctgccaactgggctcaagtgatcctctggccacagccaccagagtagctgggactacaggcatgcaccaccatgcccagctgatttttgtgtttttgtagagatagggttttgccatgttgcccatgctggttttgaactcctgatctcaaacagtctgcccatctctgcctcccaaagtgctgggattataggcatgagccaccacgtccggcccacattaactgaaggaaaaccagtttgttttagagaatttatctaagtatatgctttgtgaagctttaggaagaagcaaacagtggagttcacaaaataaaacaatcttacaaatctctccattttatttttaaagaaacagagtatgaagtaacttgttttgagtgtatgaatttgtgacatatatagggagacatgaccatgggtaggcaattctagtgattctttaagggttcctaattcaagccggttaaattggtagttgactctgagtgtactcttatgacagaaaagcatcaaagtgctttttttttttttttatagatagagtcttactttggtgcccaggctgaagagcagagcagtggcatgatctcagctcagtgcagccttgacctcccggctcaagtgatcgtcccacctcagcttccccagtagttggacacaggtgtgaaccaccacacccagctaatttttttttcctttttgtataaatgggattttgctatgttgcccaggctgatcttgaattcctgggctcaagtgatcacctgccttggcttcccaaagtgttgggatgcaggcgtgagccactgcatccagtctccaaactgctttaattaacctgtttgatttttgtatcttcttgtaaatggtacagataatgatcttgtatgctactcaaaaattcttaatataaataaatacaaaaatagaaatgggtggcattcacgagcattttttgggagctttaaattatcaatttcataggtgtgtttccttttttttttttctttaaagcaagcaactggatatctagcatagacctggacatctaagtaagtgatctagaagttgacagtggataaaatctgaggtataaaagaggctgcacaaaataatttttgtctgctgtcttaacaggtctagcatatcaattttactcagtttttaaaaactcattaataaaatttggcctgtaccatcatctttgctgcaatcctcgtaacaaacaaggactggtgctttatgacagcagtgtcgggactggaagcccagttctccctctgattagctgtatggccttggatatgtggtttgacttctcctggcctcaggtttcctgaaaagtgaggggttgcattacatcagtgtttctcagcattttcaaagccaagctccctttgccaaaaattcaagtatgtccccacctctgcttcccctcctgccatctcccaagatttccttatacttctagtggataattattggctcttatgatccctcatacccctcccagctctagcattttgttattctgagcagatactgggtttgaaatcagtggaacaaaggtttttatctcactgtgtgaatagatgcagcttgctcctccttaaagctggaagggggcccttcccaaattcattcacacagaccaggagtcctgccttgtgcatgagcaaaacctggaagcttgtgttagaaatgcagaaacttgaccccaccccaaatggctgagtcaaaatctgcattttaacagtgcaggtgcttcacgtgcacatcagtttgagaaacgctgctgaccactgttttttaacctgtaggtggcaatattagtgggaagtatcagttcagtgggttacaaccagcgtttatttcttttaacgaaatatactaggaaagataacattagggtacattgtatttggtaaaggaaaatattgtttcacaaaacttacgtttcagttttatatgtctgtgcctatttatgtatataggatggagaggtcaggcaaaaagttaacttttgaggtggatcttggacgaaaatgttaaaaaaaaaacccagcaagccccattctcaggcagtatagcttagagacagccatctcttcccctctatctttattcacacacacaaacatgactgttcacacacgcaaacatgacacagaaatacacagattgaccaggcccagtggctcatgcctgtagtcccagcactttgaaaggctgaggcaggaggatctcttgaagctgagttcaagagcagcctgggcaacacaggcaataaagtaagatccagtctctacaaagaaagtttttatttatttatttatttatttatttgattagccagacgcgatggcatgctcctattgtcccagctacgtgggaggctgtgacaggaggattacttgagcccaggagtttgagggtgtggtgagccatgattgcactactgcattccagcccatgaggcagagcgagactctgtctcttaaaaaaataaaataagataaattaaaaaataaaaaaaagaaatacatagactgatatataatagaagagctgttctagtatcactcactttctctaattattcatatcagatataagctactagattttaccatgagaaagaaacaaaagtagacagtattgttgagttatattaattcaaaaaattttctcagtgatgtttatacacaaaattacaacattgtcagataagattttatgtttttaagttattattatggggagattgcaaatacttgttcagtttcctgtaagtacagataatgcttttttctctaggggctaaattgtgaaacccatggtactgcaaggtcattcacatgtcccgctggatctaagaataaataaataagttggttttgtgggagtattttttttataagcttactcatataagttttctaacttaatatttaatcacctaataatactttcagtaagtttgtttaatgtggagaaagtatgtttttgaatgggtattttccaccctgaggactttacaatctcagcggtaattcattacttacaagaaatactaagatacagactgtactgtagatagactttaaaaaacagctgggaggaagttgtcagccctggaatcctaaatctactggggtgaggcaggaaatgcattgcagaggtattctgaactgtcatgataaaagtaatgtttcacttcccctaggaagttttctttctttttttttttttttccatttattttgagtaaaaagtaaaggaagagtttgctcttgtccccttcacaaggctctgtgttgaggaagaaaactggcatggatctggaaattcaaggaggaggaaaacactgcacacctgcattcagaattcagaagaataattaattttgcacctgaagttgggtgggattttgtgtttactgcgttctaattactgtttgtttgggctgtaatttatttattgtgttgaattttcttttaaagtggttttggagctgttacagggtccttttatatagaagagattgaatagaatgtgaaatgtaactctttatactgattacacgttgaaacacaaagatggcaggctgctaagtaacatacagtctctatagatcttaagttactatggttatttcagctgtaatattgtttctaccttaaggatactctggtttcaggagctctttaagattgttttttgttttacatttgttcctttaggcttcagttgttgttttaggatagcttacatatttagaatattttcttagaatcacttatgactaagtcgggaatccatgctggcctaaggggcataggaaaatggtgccgcagtatgatgtctgttggtcttaagttgcacgatgtcacagaagttggccttggagtctgccagtttaacaaactcttgctccatttctctatttggcagacagacaagagtactaaaggtcctgactgggctctgtcttgatatgtcttatctggagatggcactgtccagcactatccagaattttagagtattttggagctggaaggaagcttagaaatcatccaggctaacctgcttatttcacacgtgaagacctgagccttccagggataatactcattcctgctcctggccaggacaaaacttgaatctggatattctaacttttccgttcaattcctcccccccaccgtcccccgcccgagatgtagtttcactcttgttgcccaggctggagtgcaatggtgcaatctcagctcactataacctctgcctcctgggttcagatgattttcctgcctcagcctcccaagtagctgggatgacaggcgcccaccaccacacctggctaatttttgcatttttagtagagacagggtttcaccatattggtcaggctggtctcgaactcccgacctcaggtgatccacctgccttggcctcccaaagtactaggattacaggcatgagccaccgtgcccagccaattttttttattattattgttataaacattatttttatagaaggaagggaagtgtttttctagttttgcattctccagaagccatgctcttcatttactgtgtttaaattcttttctacatgtgagattctggtaacctgtgacatcatgtccacattccaccttgctttttaggttcttcctactacctttttagtaccaccacactcctaccccaacatcaacttgtgggagcttcctctgaaccaaccagggtaattctctggcttttgtgaagaatgatccttccagtctatgtccttgttggtcactcctcttcttactctacccacctttctttcagatttgccattccttttattgtttttgtttgtttgtttgtttttgtttttgagacaaggtctcgctctgttacccaggctggagtgcagtggcacaatcacagctcactgcagccttgacctgggctcaagtgatcctcttgtctcagccttttcagtagctgggactacaggcgtgtgccaccaaattttttttgtagagtcagggtcctgctatgttattcaggttggtctcaaccccctgggctcaagtgatcctcccaccttggcctcccaaagtgctgggattacagatatgagccaccaccccttttattcttaatgacatgtcatttgtattcagctcactcagccatccaccccctctgtgaagccttcctcaacctttttgtcccctgtcttttcatcctccctcctccctgatcttcccttggttgaactctatttttagaaactgtactgtactacaccattataagcaatgcaattaagggtagctaaggctgggaacccactcttaaaagcttttcctttctgatgaatgcattctctggcaaggaaattttgaaatcattgccttagtccccttactttctcttttggccctctagttttgtggtgattaatttaaatttaatgtcttcagtctggtatcttcatattcacacacccataccccttataaatgctgttacaaaaactagatggaacaaattgcacaaaaactcttgtgtgtttcctggcccagagttctcagtgggcaacttggcgagtcgctggagttcttagaagaacttttgaaggaaatagaacaattgggctgataagcattcaggagcacagaaccaacccttaaaagatacttgaatgataaggaatctaatgtcttgatgggatctggaaggaaatctcagtcagtcatgttgtattcaacaatgcaagtcttaactttaattcttttatctgaagcataagaaaatgatggtttattcatgaacttaggtaaagagatttctatgtggagattgcagttttacatgcaaggatcaactttgatggatatctttgagaattaattgtgaaacatattgggaatttttatttttaggttttattggaatagtgaaggtaacatgggcccctctcctttgacaggcttaatccagccaaaaaaaaaatttaatactctattggtcagtttcacagtcttgagaagctgcaaagtttttttccaaacaaggaacagtgaagatatgagaaccagtttcattaactaattagctatgtgattttaagctttgatatccttgttatcaaatgggattaattgattatttccttaactccatggtatgtataagtgagacacactggctgtgtaaaggggccttactcttcattaatctagtagctatgtgttttttaacatcctggcctcaggcattccttctctgacctatccataggagcaactgattcctggccagtttctcacccctctccagttcacctcccacatttagttttgtttttccagttccctgtgccagaacttctctttccagccaccattcccagccctctctcagtcactcatatggccaaaaggaaacaaagaaaatgttctgactgtagtgataactggcccatgtgggggcccccctcattcctttttgataatttatttaaattgttaaattccttttacatcttgaaagcatacagagaggaactggtgtatggaaataagtgtagcagacattgtcttcacatagtactcagttcatttcaggcttgatcttatactgtttccctgtgaaaatgataatgttctgtaaacttctgtctgctttcaggagcaactgtagtgattattttgcttctggatgaaggaaatagttgatgtattaaaccaacctgctgtttgggatggtggtggtggtggtcgtggtggtggtggtgggtgtaggggcaacaggggtgggaatgataaccttcttgaactataaggatgaaaactttaaagaagacttgaagaaaattaaagggcaggtcctagctttcctttcccttcaaaacgtactagaattattagagaagtggctaagtaaggtgggggtgggaagaggaggacagcttcagctataagattggtcagagcactgttctttagcctattagtaataggaaggaaatgagacaatagaattttaaatgacaagtttttgttttaaaattatctttgctgcatagaaatctataacaatgtacatgattactaatgtattttagttcacatgtggttaattttgtaaatgacctttagatttgtattcatagaggagagactatttctctcttctctatagggggtgatgtgatagagagggagatagtattaccctgtgtatagttgccctgtgcctgttgttgatccttttagtgtaggaggcccagtggggcttctggcgggaaggaggcatcagtgttgtccatgcaggaagtgctccctgattgctatccatagaggaagtcctccctgaatgctgcccacacaggacgtgctctctgagtgctgtccatacgggaagttctctctgagtgctgatgaacgctcttcctgatggtgccaaaccactcgtgcaggaaaggctgagggtctaatacaaccacccctttattcacgagtgactttgttttctatccattttggcatgcaaattaagcccatataaatattatcaagaaaattgaattagcttgttttctttgcccttggagatagaagaatgtagtttgtttgcctgacctgataacaggaaaaattaggctagagaaggctgagagactactaggctcttttgggatgagtgggcacttagcatgcttatccagccaccaggtcccctaattagattgaatgtgtgtaaatagttgcaagcttcatccatagagggtcttttcacgttccaaggcagcttccgggttttgagaggcaaaatgtagaaggactaccagtgatgaaaatggaactggctaaaatattgtccctttttgtccctttgtaagctttttaaaaatttgtttatcatttgtgctgccaagacacctaatctaacgcaaagtgtaattgctgtaaatttatcagagttctgaagctgtaattaaaggcttgtcagtatttgcattttaatctatgaatgagggtttaatttttcactgttttaagtcacgtcatcctaaaatgttgactctaatgtttagcagtaatatgctgaagctttcagaagttgtttgtagaatttattctttaatgaaaagatttttataaagtagaatttttaaaactgatttttttaagagctaatctttgtttttttaatacttaacagactgtgtgttaattaagtcaacttaaaggcaccttttactttcttaaaaaacattaaaggcaccttttactttcttaaaaaacatatctgccaatggtattaagtatcaaatttcagagaagctggaatttggtaattagtcagcaaaaatgatgggcacagaaaatgaaagaatacaaatagagcattcaggacatagaaagtgttttggggtcccacgtagagtactgtttgaaggctctgctctggctttgttttctagcagacctgcgttcaaattctagccctgccaccttctaaatgtgtggccctggcacatggcctaaccttttttgagactcggtttcctaatctgcacaatgggagaacaataacctacctgcctgtctgattgaattaagtatggtaatgtatgtaaagtactcagcagagtctgtatctttagtagagacggggtttcaccatggtggccaggctggtctcgaactcctgactccgtgatccacccacctcggcctcccaaagtgctgggattacaggcgtgagccactgcgcccggcccagtttcagtgacttctaaaaacgtaatcttgggtttaaaaatttctgcaccagaaaattaaaaattgacaacctagaataattcaacgcttctctctttcagttttctttctctgtcttcagttagccccaagaaagaattgatttggaaataaaatttgaatttgaactttgttctgtataggattcaccagaggctagtagtcctcattgggtacatttaggaaccctcttctgcctgggatcagatgctgggagatttcattccctcacaggggaaacttaacaggggaagcagggaagcacaggctgtacctgcttcccacattgggaaaatactgcagtaaatatggatggccatcaaatttatattaaactggctctgtaaattcagatatgtaaatcatagctgtattttggccagaaatgaatacataaataaaaaaacctactactttcatgtctaaataatctccaactaagtcatacatccaaatgtttctttaattatacaagtgcatgcccgccactccctttccactcctggcaaaatcaaaggttcaagtgaatgcagtcttggaatgcagtctttaaaatgcctgatggttcatttacttcgtgttgatgtaatcccactaagaggtaggggcgggcctgatccacagcttcttactgacttctccaagtctcatcccagatgaccacatttcatcgcccaacagctacgctaaacatactgggtcctactgtgaaaacagtgtggcttgtgtcagggatggtttctgagacactaatcaaaggaggtttaagagaaaattcagtcctgtctagttctaatagctacaagttctctgcgtcaatcaaaggcttgggacaggaggcaggtgtgtgggctactttccagcacctctgttctcactgatgtgaaaaatagagtagggctggatggcaggtagcaactcagtggcttcagagaaggagcacaggctttgtggggcatggccagtgctctgaggtgccacctgtggcagagcaagtgtcagaatttggtcttagttttatatctagtaagtagttagcccctagagaaaaactagtggtttggagaaaggatatgagttcagctgctcattaagggcatgaatcaaatagatttggtaggatatgatctcaggctgcttttattttgggattaagcaataccgatgttcccagttcaagttcagccttcagtgaatagcatttctgcattgactattattgaccctttgctgctctccttctaaaagagaatctctttaaataaagtggtgtttggactcagatgatatctcagcaaggaacctgggcagtggaaggaagaatctgaaggatataggaccagaaaaaatggtaacatatctaaattaatggggccaggcacgatggctcatgcctgtaatcccagcactttgggaaaccgagttgagcggatcacctgaggtctggagttcaagaccagccaggtcaacatggtgaaaccctgtctctactaaaaatacaaaaattagccaggcatggtgttgtgcgtctgtaatcccagctcctcaggaggctgaggcaagagaatcactggaaaccgggaggtggagggttccggtgagccgagattgcaccactgcactccagcctgggtgacagagcgagactccatctcaaataataaaaaataaaaataaattaatgagatccccatatgttgagatattatggaattaggatgaccatggcagaagctgggtacaaaactaggaatctatagtgggcaacggaggttggtgacaaggtaaatgaggatatgcttattgtaaggggtctgcttctccaactttccactgtgggatttgatttgtctcctatagacatgcctgactttcttgtttgtgctggtaaaaaccaagccatgagatttgaaccttttgactgtctagtgactatttaattttggatgttcaaactgttcatgagtgatgtccttgagttagtacagtatatttatgatttagaaaatgtgaggtgaaaaaacgtccctgtcctggtgtgaaattgctgcgcgtttgctgtgaggacacttggggttacgtgcccttttgtctcaagctgagccatttaacttcctcaaagtcatgtgtgtggcactgggtcagagaactgtggtttctttcagtcggtgcacagagaattatctggtatgagtacaatttcagacattcttcctaggtggctgccgactgtaaaaccacactgagtcctttggttgcaggctttactttgagttgtggtgggtgctgcaagctgggaagttttccagcttggacaccattctcacaggggttaaatttcacaaggttagccagagcgaaaggcagcctgcctgggaatcttacccagatgtctcaatgaagtcgtgtgcctgtcttagaactaggtgagatcgtccttattggagtatctggattaaactctaactttcttgtacttgagaagtaattttttttaagagtcatcctaataaaattttaagcaactttcaatcaaacgttcttcagaatttgaaaaccttttcaaaagtctagtgatttctaaattactgtgtattaagatggtatcatctaacttcatgcacgttttgagtctcagatgtgttcctgaaaaatgtgtgaataaattaatgttacataaatttagtcacatttaaggtgcacatagagaacttttacttagtaaaccctattatcaattttatgttgaaggagagggcttttttaaagtagcatgaacagaccttttttaaagtgtaaattaaaatttataactcaaagtagcttaaagtaatctatatttaaatcttggtaacttcattttatttggtgtcagcctcctaatgctagcatactaaggctcctgatctttgttttccagcagtctctggtcccagcccaccccatggcccctcccagtcccagcaccaccagcagtaataacaacagtagcagcagtagcaactcaggatgggatcagctcagcaaaacgaacctctatatccgaggactgcctccccacaccaccgaccaggacctggtgaagctctgtcaaccgtaagtagtagttgttcctattattttagctgctaagtattttcttgatcatattatagagtgatatatactgcattataagagaagtttataagaagtatctgtggactctcagtgtcacaacaataaaatgggtttcaagttttaacttcttaaatactttttgagtcaatattaacatcatcagactggctacatatcaaaatgaattggagcattttctcaatagaatttgactttatgggcatatgagaagtaaaatatgaatttttttaaaaaaaacttatggctagatatttttcaggagttctcattttttgtggatgcacctctgagggccggtctatcctatgagaggaactttagctatcattgtttgtcagaaagattgttaaccatctaacgtcatactgactgtaagctcttaattccagctgggaccatattagtctgtccccattagcatccatagttttgtggtctggattgtacaccctcatcactttaggaataagaactcaattctgccctttcagagtgttctgaagggatgtgtgcatgtgcataaagttccaaagtaaatttgcattatatgctaatgttgtcaatgaatagaatataaatgtgcttctttgctgcaattacactaactcactaagtaagaaagcactaattttaaaacaaggagccagaagcactgtatagtgcaaagatcattgtgtaaggactgaaagcatcaaattgcatcgagctagaaaagcctacacatataagcgtactttttatttatcctaagacaataatggtcccttaaagagagaattttgcataactgcaatagaagacttttgctagagaatgtttcctattacctgaatttcaaaacatctgactgataacatctcatttctcttttcctggtcaaaatccagattcattacttcttatttttttaagaaaaaaaaattcaaaactaacttggtcagttatttccaaactggaactaaaagtaacatctggccttccatgggtgggggaaggagtgatggttgttgtgctgtgtttgttttgaaaggggaggggtgggacagcaggtggttgctcttcaggatctggagaactttctagaaggccatccctcccagcactctccctgtgtttttctcatgtccccctttttgatcagcccttgtggactttgactccagtccttggcttttggggcagtgaaataatgtcctgcactagcgactgctgtgaaagcaagcccagctcttggggtttgtcattgctggctggaggcagagggaaccctgccaggcacgccctgccctattgcagctgttcaagaccacaaataagccttttgctatctcctctgctgctggcctttcagtggcgttgtcttatgtttttgcagcgtaattacaggtagataagagcaccataaagtctaaggaactaaaaatatgactgtaagaagcagaagaatggacgtaactctcaaattcatgaggtgtaagagaagaggagaggaattcaaaaaacaaattgttcttcagctagtgttgaattatgtagggtgagttttgatgtcaaggagacagttaaccctaaaatactggagtaatgccatgttttatatacagtaaatatgtacttgaaaaattgagtcagtaatttttttattgaactgaatcatattacaaatgtggcagaagaacattttatcatttttcctagaatattcatttcttttttgttgttctctttgacatgtatggattttcttaacgtgtgtaaacattactctccttgctattatcaatagcagcaataacgctttgcagccctcactctctcccgtcacttgcaaaggaaggctcttgtacaatcccaggttttatactgaagtctgataatagtcttcttgatatgtaccatgcagaggcaaaacataacaataacagaagagtctatctcaaaatttgctggaaacttcattccatttaacacagagaatctagtaaataccaaatttgacttgctgagagtttcgtgccttagaatgtagagaaagcacaaaagagcattcctgttctgaacttaattgtttccaataaagaagagctagttggtgacatagaagtgacaagaaccttatgaggaagggactcatgctagagcttaaaaaaccactggacataattagagatttttagaaaagtaggtatcagaaacatctcagaaaaaaagatataaatccatacctctaaaaaagaaaagaaatacttagaactaaaaatttagcactgtaattacaaattgacctggtgaggctgaattaggggggtaacgaaggaaacaaatgatttggctctgcagggggcttggatattttagaggattatttaacagaaagatggggacaagccaggaatgtttatcatggtggcccagttccatacaaacagtgcatgaagtccaaaggcaagtatgacatgaagattttaaaaactagagaggaaaacaaaaaatattttttaaaaactgtgtttgaagtagaacatagagatgctgtaatgttagaggcggttacagtggaaaagcagatgttgtgatattgagatgacagggaaaggcagccccacccagactcgaaagagggagtcatgaccctggaaagtgtagatcaccctggctaagaggaggaggcatgtggggtaggagctcagactggaagccaactagcctaagttcctgatacagggtggtgacagtgctgtcaggtaatctggattgaaaagagataaatttcctagaaacatttaatgaaagatgtcaaccagctctagttaacttctaaattgtgaaacacgtacgaggaatcttggaaccttgactgctgtaggctgctgcaactttgctccctatttctaagaggttatctattcacaaagaagatatcagtacagttaaccagcaagttcaggaaatggaacaatccaggtagccaaaaggattcatctactatcccttggcctaattctcttccttctctgaaatcaagccaaacaaacactctgcttgaccgtgcttatctgtgtggtctatttgtcatataaatatttgccaatgcaatatttctctcattgagacttctcaggcagactgtttagatggatgaattgagggctcatgttgtgtccattttcttgacatcttagccatttttattttgccttcagactttcaactgaaactgcactagcatcttaaatatctcttattttccctagctttttttttcactctcatccctctcctgctcaactctctgcccttctggtttctgttttcttggctgcctcctccatagtcccatcctctgatagggttattctccactctttctactttcctgcacattttccatttgaatattttatttgttttatttttacctcatactcaacctcaaattcaaaatatcctttctctcaacactgtctcttttccaaatttactttcttaaacatgaagctttaggaaagctttaggagtcagcagctccttctctttgtccctttgtcactaagttttgtggattcttctttggcccttcttccttcttctccagcccttcttccttcttctccctaccagaagaaccggctgactcctccctccctacagtgtgacaggagaaccatttgctcctctactacctcccatccggtgcctcccctccccatctctattcagcaaggccaggtccaaacgctgtttgcctcctttgtgcttggaccacaccagtaactctcctctttatttctaaatttttatgtattgccagctcataatcagcatcttatttccatatagttctgttctccaagtgcctgttacattacttagccacatgtctgtgacagtacatgatgctaacagcgtatcatcttaaacagatttgtcacccagactacaaaagcgttgtagtcaggattgctgggtttggtatcccagagttacctaaaagtgctaggcaagttctgaattctcagtcaacagactgtaaaataggtcaaataacgctattatcaaaaattgtgataagcattaaatcaaataatgtaagtaaaagagctggtccagagcctacaacacaattgtctctgaacaaatattagtatctcttgtttcttccatccttgaaattctgctagaataagcttaatttatattgaattgtacatttaaaacaaaggaggaagaagctctaccagattttgattttgaaagctgagaaagccagggaagtagcttaatgctaacataacctccaacctcctcttccttgaggctttttttttgggaggaaggggtacaggcatacctcgttttactgtgctttgcagatactgcttttaaaaaaaaatacaaattgaaggtttgtagcaaccctgcattgggcaagtctattggcatttttccaatagcatatgctcactttatgtctctgcgtcacattttggtaattttcactatatttcagatttcttcatcattattatgtctgttgtggtgatctgtgattagtgatctttaatgttcattgttttggggcaccacaaaccattcccatataggacttaatcaataaatgttatgtgtgttctgactgctccactggctggtcattccccttctgtctccttctcctccatttttctctgagatataatattgaaattaggccaaataatagccctgcagtggcctccaagtgttcaagtgaaaggaagaatctcccatctatcactttaaattaaaaccttttaaaatcaaaattaagcttagtgagaaaggcatgccaaatgccgagacaggccgaaagctaggtctcttgcaccaaacagcccgcaaaggaaaagttgaaggaaattcagagtgccactccagtgaacaaatgaataagaaagcaaaacgtccttattgctgatgtggagaaaatttgagtgatctgaataggagatcaaaccacctacaacattcccttaagccaaagcctaatccagagcaagaccctaattctttaactctgtgaaggctgagagaagtgagccttctctcttcaatgctatgaaacagcattgcatgctatagagaaatctttcatgaaaggaagagtccattgatgcagcaatcttcattgttgtcttattttaagaaattgccacagctatcccatccttcagccgccaccactctgatcagtcagcagccatcagcagcaaggcaaaatccttaaccaatgaaaaggttacaacttaggctgaaagctcagatgattgttaacacttttttataataaaatattttttaagagattggggtctcactgtgttgcccaggctggcgtgcagtggctattctcaagcatgattgtagtgcactgcagccttgaactcctgggctcaagtgattctgcctcagccttctgagtagctggagttacaggtgtgcaccactgtgcctggctaataaagtatttttaaattacggtatgcacaccgggcttttttagacataatgttattacataataagctacaatatagtgtaaacataacttttacatatgcttgggaaacaaaaaaattcgtttgacttgttttattgcaatactcgctgtatggcagcggtctggaaccaaacctgcaatgtctctgagatatgcctgtgtttgcagaagaattgttgcagccacatgctacccacccctgattattgctcatcataataattactgtggcatgtgaaatattccattatgtccagccttttttaaagatttacaaatagcataggtgtgcaagatttggtaatggctctccctgatttgtagtggagtaaatgtctgagagtctctgttggccaaggccgggtatcttaaaggttgctgtggtattgacatcatatgcagagttctagataactcagtgtagcagtaacttattttaatggaaaaaccagtgacttgatattaaaagaaaaatctctactctttgcgtcttttacagacagcccttccttcattcctaaaccaattcttgattcagtaaatttttaacttgtttccaagtgcagtaaaacatatgactttaatagaaatgtgaaattaaatctagcttatgatatgatagcctgttactatttaaaatgaaatatttttgaaatgtaatctgtttcctcatttataatattcaatacatatttattttctgtccctatgttttattttctctgtaagttttccttgtgcttttgaacacagcacagatcttaaaaggtgaaacagtaaagcaagacaggtcagcagagagacaggatagtattatcatcaatgtggtgtactgggagaagccagaagaaagctaaccttgatgtgaaggaattggggtagctttcaggaaggagatgacatctcagtcttaaaggacaacaaaaatttcatgaagggtgaaagcaatagtatcctccaggcatcaagaagtgcccaagaggtgtgagaacccttggatgtttaaaaaggcacagaaagggcttcttggtgcagagctggcactcggcagttgttagttacccggggttcccatgacggggtgtcagtgggtgtaaaggaatatgaggctggaggtgtaggttgggggcatattgttagcatcttgactaagacagttaacgctaacattttagtttggagtttattctttagttacagagaaaaagttagctgttggagtagaagagtagcataatgaatttctctcctttctttctgtctctctcagatgctaattttgacaaaagtaggaagagtggattggagaaggcaaggactctcataggtgagagggaagcctctagttgcattaactgggagagagcacacatgaaaggcaccgacttttagtggttctctcttagtcccaaaactccagcatctccctgtgttccccagatttgaccatgcttttatttttgttatctacaaatagggcccaatgaaccacttgcttttctgaaaccactagctagtttgttgaatgctgatttaaattattttttgagacagagtctcactctgttgcctaggctggagtgcagtggtgtgatcagctcactgcaacctctgtctcccgggttcaagcgattctcctgcctcagcctcccaagtagctgggatttaaaagaatattttaagttattcttactgtcataagaaattagggcaactaacaggagaaggacaacttgaaatggttatattcattatttgtacatctccattgatctctgtaatactaagatttcttaagcaatccatctgctaaaagatgttttctctccaccctgaaattaaataatcatcgcttttattacaaaatgattaggctacctttagggtaaaatttgaaagtgaaggcattctaataaattaaatagttttttgatgcttaatcagcttttaccctattatgaagttaccttcaacatttactctgaaaggagcaatgggcccaacagacccagtgttttgaaatctctatgtaaataggaaatcctttggaatgtatagaaattacctgaaataggagagcccttattttcaatacaaaagaatgatcctatgatgaggtaggaaaatcattccacccaggagggactcagttctcacttttaaattgaagagagaattttgagttaggggacccaaggtcaaatgacttgactcagtccaaaaagcctgaacatacccttagttattacatttattttagaaagaaagagacacacatgcttcacatgtattctacacaggagtattcagattgctatgcagatgtgacagacatagaccaaaggtttcattgcctgcattcggcatcattctaaagcaacgcctctgagtcttagaaacccgaagctcttcgtgtagggttaaattagaggctaatataaggaaatagcttctctttaagatataatttaccctttatgtgttatcttccaagcaaattgaagaactgtcttactgctggtgatggtgatagtggttatggtgtatttaactcacaggcattacaataaaatatccacagatgattttttctttggtagctactacatctcagataattgagattaggacatattgagctatattatattgtattgtagttgtttgaattttctgttttttttaaaatggtattttacaaagctactgaaatctgtatctagtgaatttttatttcttatatttctttgagggtcgaggaaagaaaaataaaagtaaacaaaaacatagggttgtgggcaaatagttcttctctcattaagtgtgtcctttaaaaattaaaaaaataaaaactaatctttattgactggtaaaaaatgttttagtcttcccaaaaagtgaaaattgggttaaagtgatgagttttctgcagttacttatagaaaatgcattccatttttgtgtctattactattatatagcttcttgcacccatttacaaattttgttttataaatcataggatttcttttgatttccaaatgtttttgttccagaaaacaactcatttttatcttctcaagttctttattcattgatctagaagattctccatacataaaatattaataacagtattttctggaacttggcttgcttctgttattgctagcataataggatgacacataataaatgacacaatgagggcttagaccaaggaacttgagcattttgctgaaaagtgtgatctatacgatgtgcagtttacagaatttgtcccatcgtaaaaaggaatgccaatctgctaagtcaaaatgttgagtcactgattgtaactcaattctctcatcatggacagtattccagtaaggttccatgttgaagagtttaacacatgatgcatttgagactgagcaaaacacagaaccttcgcaatcatcccccgtcccctgcccaataaatggacaccaaagcagagttgagagcttaagagcaattgtgtaattaactgaatcttcttcccattcatctcttgggtaagcgaaatatagaatccttttctttttcatgttagttgcatcattacttctcttggtttagaagattgttggcactttaagtaatactttatgtacagtacttctttgacataccaaggtatgtagtctgaagacttttggaaatccccagatttcacagaaataattttagcatcacagaaaaagaaaatcccatgaaataaatacctgcttcccaatagagaaccatctcatacctctgtgtatactttcttcgattttatcattagaactgtcagtcggtttgtcttcttagggggtggcagttttcaaaaattaacacagtgtttaatcccctcttgaaaattgctgtgtacacaattagaacaaaaccttattgaaatatggaccttaggtaatgggctatgcttcttcactggcttcataacgtgctctcctctgtgagagtatccacaattcaaatgtgtgctgttgcagtattaagcataactgcacgtcagggaattttaatgtcatcctgagttgttgaaacctcaaatattaattattaccaagtacctacttcatacatgcatttgatattttgacagaaaatctcagttatgtctattttctaatgtatccttagtataaaatctgctggtaagcatggatatttagaaatttagccaatcttcgttattgtcagttgacctttttctttagggtatctttttgttactcctaggcatgataaagagccattctgtcttctaatgcccaaatactgcacacaagctgttggcaaacccgttttaatatcagccttagcagaagttaattggggagccggcactggaaataattatcataaccataagaatttttttaaaaatcaccctttccttctctgtgattgaagatagtatttacatcctttccttgttcctttatatgagccttggatttctgtagcagcagcttggggatatttaaccattatacgaaggtgaaagtactgtcatcaggaataaaagcctctaaaatctttatttggcagttgtgcttggttttatgtagaatttccttattgagttactgttgaatctcagaaatgtataacttttcccttcatctttagttcataataaatgcatgtgaaaaaaaattctgtgtaatgtgtaaacatctaaataatgctagcagccaaaaattgtctaatgcttgttgtctcccgataactatgccaagtattttattatttaacccttagaagagttttatgagcaaaattatcatctctaattttctgtcttagtctgttatctgctgctataatagaataccacaaattaggtaatttataaaggaaagaagttaatttggctatggttctggaggctggaaagtccaagagcatgatgttggcatcaggtgagggccttcttgctgcttcataacatggaggaagaacaaaatgaagttgaaagatatttctttttcttattgcttaggataatacagctgataatggtggagccagaacttaagaatggacagtctgactccagagctcatcctctgaaccactgtgctttctgcctctccaagtgtaccctgaatgctactttattaacttcctctttacctcatcagcacccttgcttcctcatcagcaccacaaactacaatagactaatttctccaggaccctaagagatattgggccatgatagatttaacaagattttattagaaaaagcaccttttcttatgtccacttgaatagccaataaaataaaaaactcaaaataaaggcaggaggatagaggaggaacctgtctttcctgacatctagcaaaataatcccttttagcatagctggtcatatgaaactcagctcctggttagctgtctaatgtgcagctccccaagattacacagcatagagaaggtatccaacttgtcatttgctaggcgcctgagagggtttgtgcatatatgaaaagaaacaattttttaggggtcactgtcttacaagtcctaatactgctttagaaaataatgggcatataagaacattatagttttgctgtaagtataaatctgattaaaacataagatcaagacacttcggggagaagtgaatggtgaatcccattttttttgtaatttaacaaatatttattagacattatgccagtgatttttctagatactgcactgagacattttccacctttaaggaggtgtagaaaatgaacttcacacataatgtagatcagaatgtgagagatagaaagttactactgagattacaaagtagggagtgattgcatgtgatggggggcatcaggcaaagtttggcatttgaatgaatcttcaggatgagctaggcagccccaccccagcactgaagacaggactagcttgcctacctgccctgtctggtattcactgatgccatgatggggggaatctttaacaccagaagaggacttgtacttcactgagaaggtgggtgatacatgctgccccaaggtttgtccttgatagaatgtgggccagagggagggtagaggaagaatgtggttcaaagatgagtataagatttggagtcttaagaaactgggaatttgatatcattaacaaatatagggatcaggagaaagagtttgtttttattcttacctggaaattctcatctactctcaggggaaactgcaaattgagtgcctgtttgctttatgagttagtgtacttttggtgtggctattaaacagaaagaagtaatgcatgaattccaggctgttgaatcttcagtgcagaagagagactagtaattaaacattctgtcagctgaaacaggtgttctgtttgtttattactcactgattatttatagtggattcgaaactctcagtcgagatagcctgtatggtcagcagtgatctccaatacttaattattttcttagatgtttatactttgttttaggtgtataaattatttgaaaagttgttttttatttaataaagtgtttgcaactcccttgattagaattgtttgacttcaaactggagacttttgagacgaaatttcgtgagagagccgtggaactgagtgggaggaaaggaagatgagtttccataaatggtgtatctagaattagcgagaaagtagactcacagcacaaacaatcctgaccaagtttatggtgctgccagggcacatggactttctctcctcttgcctgtctatgcgcttactaacttggccatgccagacttaacgcttgtctaaattgcttaaggggccaggaccacttgtctccctcattttttctttgtgccatagcatcttcttgcctctgttaagtgtcacatgttaataaaggaatctgcatgggagatcagcatgtgtttgagtatcagcatttgcatgtacagctttagatttccagatttacaaaggacactttcctgcagcataaggactagttctttaaagatgaaacaaagagacattcatttgtggtcctcgaaacaaattgggcctgctagcccatttggacaggagcactgatgctttccaagtgggcttccaaagtgtttcatcttcaccttcaaagccaggccataaattgtggaattgttttcactgtcccttaatatgaggcatagcttttgctccaatgcttaacctatttcaatgcccctgtgtagctggctagataatattttgtttcttagattttcctccaccacccctattcattacccttagtttaagtttgacagcatgcaattaccttttaaaagccatacttatttaattttggctctgatttttgaggcacaagaatttgagcatttatttaattaaaaagtttattgaacttttttcatctctagtctgaattacagaactttacatctcttctagtcaagtggctgttaacgaggaacacgcaccagaatcaaaatttacatgtcaggtccttctatagattcaggagtcagaagacagagagatacttaatggagaaacagcataacaggcacttatactaaagagcacaggctcagagctttccacctggccccgcctcttgtttgagcaaatttctcaacctctctgtgccccagtttccttacctataaagtcgggataatcataatatctgcaacgtagggttcttgtagggactaagtgggttaatgtcaagtgctctgaacacttttggcatgtattaatgttactgctactgggaagcttttttaaagcttctaatggtcaatcccagttgagagcttgatttcgtctttttatgttataactgaaaaagctgaggctcagggaaggttaaatgacctttttggagtcacaaaactaggaaggggcaggcttgggaaaagagtccatatctcctgaaatatccactcttcttgatttgccactttacttttcacaagtgaatgttacacttaactctgctctttatcatgaggatgaaatatctgtacttcagtttcttgccaaagaacttaactttgtcctctccactgggcaggtcttgacacaagctcttcgaagaaataagatttatgaagaattgtatgaaggatttggagtttctttgttcatcacagagcttcccaacttggcagacagaggaaaggataatatttgtattatgttatattggcattgaattagattatgttggattgccacctatggatgaggctggtcattgctggaggtgacaggccccacccagtctccaagggttgacagaatcagcatctcctgacatgtttaagagaactagtccagcaagtgtagttttaaaaaaatgttcaacaaaactatatacaaaaatatttataagtggtatttttaattatatgctttataagtacaaatttacatttataaacttatcagggagaacagtgagacagttttgataaactcaaaaatgtggataacagttgcagaacagtatcagtaacatacctaatttatttctgtattttgttttggttgtatgacatttggaaaatccttatgcagctgcaaaaggttttaatttttaacaagctcattttgtcttgatatccccttgaattaatcttaatagaaactggaaataatttttttgcctcaacattgaattcataataatacagctattcacgtgcctcataatagatataaaagtcagaccagaagcacccaaaacttagcatcagtaccagtcaatgatgtcactttatcatgatgcaacgcggtaggcactttagtattatacagctgtctattagatcatggtgagggtgtgtgccaactagttgtacctgctcttggcctggcatttgtttgagcatgatggatgtgtaggtcatttgtacagttttatatgaacggacatgtgcagacttgaatttccaaaagaataccaacgcagagttacaactttcctaatcggtgactcacttatacaaagagatagcaggagatacatttgtctagtgtcagcacttgaagcaacttaatgtagatgtggtcatcagtaagttaacatttgttgtgctatatatttgcctgcatttcctattatttgtttttgtacttaaaggctaagaagtctttaaatacaaaatattcatatggaaaattgatggaacccctaaagtacttcttcagagcctaatttggtagccactgttccaaggaatgtgccatttatccctggatgcagcaatattatcagaaagccttgtgcattaaccacatagctatttgcccttgtagaattccagtacttgggccccaggtgatcccttgaccgtgcattgcacatagagtatggcttttaggaggaaccacaggaagacgctccttccggcattagagctgggaaaaacagaacttctcttaagcccaggacctggttttactctaatgaatactcaatttcgtaatgttgtatttccctatgttcactactaagaagttatgagtcagctttgcatccaacattagcagctctgcaggatctcactttcaggttcatgtgtctgtggaaaaactactcctgggttgattttttcttcacttaccttgaactttatatctatttttgtcttgtggtgttgcatatatttttgccagcagcctcaaactttttggggaaagaggtagaagcaaatgtttctcatgctctctgtttgactacccttaaaatcacagaaggaacattgcttagtcaccttcttttttcagtttgtatagcaatcgttatttttattatcaaagtggctcacttgggaatgctgatattttggatatctaatgcatttccattggaaaggagaatctggtcccttctcttaatggccctgcaaagaaattagtggatgcacaacagtttcctggactgtcagtaaacattaaagtcagcaaatactcaaaatcatgatttctagcaacttttagcttgattgacatctttgttgaaagttttttaaaatgtgatttttcttatacccattcttggtaggaatttactttggcattgaattaattgccccgcctttaattatttgaagacaggaaacattcagcaacttgcctggatatgtgtttcatatgcagaggtttgtattacctgtattttgcctgcttaataaatcacaatttaaaagtattggttctgacttttaaacctcctgtgaggtatgcatctgcttcattctctcttttttttttattatttattatactttaagttctagggtacatgtacacaatgtgcaggtttgttacatatgtatatatgtgccatgtttgtgtgctgcacccattaacttgtcatttacattaggtatatctcctaatgctattccctcccccctccccctaccccacgacaggccccggtgtgtggtgttccccttcctgtgtccaagtgttctcattgttcagttcccacctatgagtgagaacatgcggtgtttggttttttgtccttgagatagtttgctgagcatgatggtttccagcttcatccatgtccctacaaaggacatgaacttatccttttttatggcgaataggaacacttttacactgttggtgggactgtaaactagttcaaccattgtggaagacagtgtggcgattcctcaaggatctagaaatagaaataccatttgacccagccatcccattactgggtatatacccaaaggattctaaatcatgctgctataaagacacatgcacacgtttgtttattgcagcactattcacaatagcaaagacttggaaccaacccaaatgtccaacaatgatagactggattaagaaaatgtggcacatatacaccatggaatactatgcagccgtctgcttcattctctacctgagttcctgataaacctcttgataaattcccagccttgagcatgaaggaacattcttctggaagcagttcatcatgccattgttgttcattcctttcttttcctcctctcccctgctttcctttcaatgtctgcctaacagtaccagcgtttccttggcttgtgtagacagtaatgatatatctgttgtgagtctttctggattgcttttatttctttacagggctgttcatttgtacctcattgttattacacagatgtaatggtttttctgacctctgatactgctagaccaagatgtactccatgggtcccaccactgacaaatgtccagggcagaagaattttaataccacattgaggagaaatgaggagatgcttcctaaatgatcttggatgggagcagattaggcagtcttccattctccacttgtaatgctgttagtgtttaaaacttccatcagcagggtcctcggagtgctgctgccacactgacacggttgccaggctgtcttacgatggctacaagaccttatattttctgcctcctctccccataacttctctgactttatctccccttactgtcctccatcacttcacttcagccatagtggactccttggtgtttcttaagtgcaccaggccttccacgtgccttacaccaggttttcctcctctgcctgcactgctcctcccctggatccttctgacttgttccttcatatccttcaggaccttgctcatgtcaccttctccatcagcttacttcagccaccctttaaaaaattgtaatctgcctccacttcacctgggcattctcaatctcaacccccctccacccccccaccccgctttgcttgtgctattgtcataataccatcccctaacatattgtataatttgcttatttttgcttattataagcaaaatcagtaaatatttttgaatgaaagaataaaatgctgctttatatggcacaaaggaaggctgggtatgagcccaaatccctaattgcggaggcatttttatcttgatagccaaactcatgacctattcctggggtacatatttctctccctccctcccttcctttctctctctctctctctctctctctctctttctgtctctgagatgagcaactaaaatgtagtgaatgtggattactcagtgctgggaaaggctgtgttgaaaatgaaggctctaggatttgccacaagaacaaactttatcctcccacatgatacatattcttctctatcatcctggatttttttcatctatttattgttatgtgtatttctgtaacacatcaagtcatttttgtaatgaagcaggctacgaataaatacatctattaagcagtggtaaataatcagatacttttagcctctggctcttcattggtgacatcagcaaattaaaccagagatcagaaataaacaagcaagtggccatgtaccacctcatttcctctctcctggcagaattgctaataaatagatgagaatactctttcctactgtgcctggctgagcctcggaatctttccctatacaatacaaccactagtaactcatcagagtgggcatgcaagaggaaagctatttgaaactcttggcagattcctttctgctctgtgatccaaaaaaggagaaataaaggatttctcttcatctttctaaggtcctggaaccttgcttgtttcagattttttggtattaaatatccctctataaaacattaataaactcaagtaatcattaactgggctgtcttccagtatagtcaagaaataagttatactaattcatcaagttttcagattatagagttttaccttatatgtcttatatgaatcgtcaattttcaaagcaataggatgcattgagatacattttcttatcatcattcacattacatttatcacttgcattccagactcatcattaggaccaattaccattgaattatgcttgtgctgaagagctgcttatgatagatttcttgtcaatcaggtgcttcatctctaggtcatatgctgtatttgatcagtgcaggttgatagtcattagacaagctcttcaggctcagccatcaatgagaagcacttgaaacagtcagcctctgtgaaagccatttcattcctgcctcatttttgcctttgtcctgtgttctttgctgttgattttttacctttgccttctagggtatgtctctttgtaagctaccctaagtcctttctaaaacaagacaggctgtaatatgtatacatgctacatacataaatacacatacacacatacctgcacataagcatttatgtttgaatgtgtagatgggtaaatgtcatttttattcttgtaagtaaatgaaaaacatcaaccagaaacttttcattcctctggtgaagaggatattttgaatgagacacctttaaaataccttgttggggagcatttgggatatcaaatgcatatactcttttgggaaaataaatccagtattggcttggggtggatttatataatggtttactttctcactatgttttaggtgcaatacatagcatcctttaattggatcacaattaggaaaactttttccggtaataaaattagagataatcactgtgcaggccattgttctgttctagaatggtcaaagctcggaaataccactcctgcctattttccatgcattagacggtgcttaatttgttgctgtttattttagcctcatttctcaatcatggactctgaattaagattgaaataatgaatatgaaagcactaagtaataaagcactctattcaaacagaagattaaggatatcagggcttctactggtgtgttattgggctagatttgagacattgcccttgaagtgcagcaaaattccttagtctaaaaatgttatgaatcataatatatatgaaggtacttttgtatggtgttagagatcagtaaaaatgtaattctcaaaatgacaacttccacagatagaaattggtagacagaccttcaggtgatttcacccatagtattcagggctggtttatactggtacttgttgaccttcgatgagaaaactgattagttctactactgtcttgtgttcaccaccatttgcttagaataattttccagttctgtagtcttacttgatctttggcatcactggaattcattattgtggctgtctcttacatcactggatatcacactgatgctgtaagaggtgataaaagtaaggtttaagatggtgtttaaataaacatagtatggtgttataaccattaccttaaaatttgtttgagaatcttgtgttttggcaaggttgtatttgctttggtggtaaagttgtttgaaatgtcttgtgagcagttatgttgaatttttcactgaaactttaaaccatttgaattcgtacatctacagaggcaatagaatacagctttagcattctaagcaattaattgccggcccttagtgaaaaaaaagaaaaaagccatggtcccacctctgcattaatactcaaagtggatttttttcccctttagttcaaagtcattcatttttctgatattcatttcttacatgatttaagttaaagctgaaagactctgacagtggttttatacctatttttttcactggtgataagaaaatatctttttttcttagtactgctagaaaaggaaacaatgaagtttctttcataatcattcttttcaaagtttgctttttgagcagaacttccttgtaatattatatttagtttcaatttatcagggaatccaaatgaaaaataaggttttctttggtgtattttggaaggtagctttaagaaattttgttcataactctatagtgtttagaggattttgttattgtctaagactgctaatttctgttcttcagtttttccattccattgcattgccttcagagtcttaagttttaggaaggcttaaaacaattgaaagattcagtcttaggattaatcattgagagaattaatatgtagcacctattgcttgctggctgtcttcatcctaaccccattcctgcattggttaatgtatcttcaggaggagtggacggatgatggaagcttttccagttttacaacatgagaactcagatcaatttaggttcactttttaaatggatttaaaggagatttggatattttctgtgatttgtctctattttaaggatatgttctaattctcattttataccattttgataaacaaaatccctccttagaaagacaggaaagcaggccactcttctgaaagaatgcccaggctgccccagggccccatgcagcaccaggagaccccatgaactgctgcccactttgcttagtgtttgtgtcatacaaggagttaaatacttttagcatcacttctggactggcatattcatgttaaagagtacattcctacggtcggtaatatcgcagcccatctctgataactgtaaagacccagaacaaaagaggtcaagagccaaagctctagctaaaagtttttttaagaaggggcatacctgggagaaattcagtggttgagaaaaccctaaagaccggagaaggcttccaagatttggggaaaatttgtttatcaagtaattcaacaaatattattgagagtgcctactatgccgggttctgggaagtgaaaagtgaagttactaacgctccttcactctgaacagccattgtctgcttgcaataccaattttgacaccatactttgtatagcctggactgttacagtggtatccaaccttctttaagttttaaatctagcgttataaggaaagattgttcccactactcaccacccacttctgaagtgatcatcaaaatatttaacagttagaaaacagactctagccaatcagaacaagcactggaaaactgaatattatccccattctgccctcccatggggaacttctctgacatttttcaatgggattttaagggatatgatttatgtgagctgtcttctcaaagaataagtaaaagacaaagcatatgacttggagtcagtttagaaacagatgacctgacttcggaccttggacctaccagttaccagcaagggttgcttacaagccagtctttaagaatgcactgaatatttgcgtttctgtttctttatctttaaaatagaaatgctgttacatggaatatgaatttctaatctctacttcaggtctcctcactttcatcaggtgtgggcggtttcaggtgccacttgaactccacagtggtccctgaaacactactagcctccccgtataggcttaacttcctgcctttaaatgttagtaactcaccctttcctccctcacctttattttcagctgctctctataaactgatcatttctggtatgaaaatgtctggtatagccctcttttctgggctgttgtcttgtttttctgtctactagtctctaggactcgagtgccctctgagttactctacttagcattgtgggtttcacaataggaagaaaaagagtttccagtttcatttcttctgaaattaccatgtaatcttgggcaaatttgcctgagacttggtgtcctttcttgtaaaacaggcgtaaaatagtaacattctaagcttatttgtaggagatacatagaggtatgtatcctatcatgtagaccaccaaacctaagagactcatagctagaaatgtctattaatatatctttatcattatattttaagttaaagatgatacgtcacttttttagtctggggagttattgtatactaggtccagtttaataagcttttattgggcatctactatgtgtccagcactgtgctaaatggtgggatgatatgaagcccaaccagcagagccccccatagctcatggtacctaacacccatctgtactgtaataatgggttttcttctctgttctctctagtgtctgaactgaatgctaacacttagtaggcactcagtaaatagttgcaaaatgaacacagttgtaaatgttttgccatttccatgcacttggctcttgaaaattaaaatttgacctccttttgaataatttacacctttatagaaaccattggtgtttccatatactgttggagtcgtagactaaagtgttcattaagaatgaaacaacttctagaaataacaacaacaaaaaacaaaagaaaaatgaagtgttcatcaaggcaggcaaaacatcatagatagggaatgggatgcaaaaatatatttgcccatcttctgcctttgggtgtggctccacggaaggtatctcagaaagttaagtgcttaatcttggttaaaacttctagaggaataaaccactgtctttcttagtaatacctgctgttccccccagttgctgcttacaagttacctcttttgccttctttactggctattgcgaggactatgtggcatcgttagttttacaattaaaatatcagaagtgggttgttttaccgatttcatcttgacttttaaaaaatataactttcaggttaaaagaaagaaaatgtccatttaaaaggtagcagctgctttcctaatgacaagttgttcagattcctaattacttttcatatctttaatcttgcacaccagtgaaaaataacttattcatatcttttgaagatgttatatttggccaacaaagagtaggataggaaaatatgtttatttaaaacatatttgcgattcctatgatattgttttaaatgttagcctaatttcattcagtaaattcagtttcttgtagctcatgttcttgaactttgaaaaatatattatgcaatttgctaaattaataacgcatcaaaagtagaatagaatatattgtggtcttgccttctggatagtttatttttaggttttaaaaaggggctccactctaattattctcctaatggcagaacaagtgctataaaatagtattttacaatcacagatgcctcataagaagccattttatatcgtctttactcccattttctctggttgataattaaattttactccaggtgactcacagcagaggtcagaacttcctataatggcaataatgcacattaataactgtgtggtagccagtaacatgatccttaattagaaccagtaatccgataggcttaataatgaaacaggaggccccactgaacttgttccattttcatatgcagacccaggacaaagccatggctgtaatttggctacaataagacagcaaaatgtggctcagtgctgctgtattgctaactaaaatcagtctgtcattttaatgtagacttcttgtttttaattttttaaaaatttatgacattccaagagaatttctgaaatgcaaatcagccatctttgaacatacaagtaatgcacactctgcctttatttttagaaatattcactagaagtctgattctgtttgcctgagattcagtgaaaagaggaatctttgagaactctgcagttgcccctccttgggtgtagcatttcactgaagtgagcctttttgcccagctggcagtggtcttcttctggatgtggtctgtaatggaagtgttgcctgggatctcagtttgtcttatcagtaagtttccatgagctccatgccatggtggcttcataggtcccttattccagttcatgggagataattgttttttcttttctttctttttgtttttgtttgtttttgaggcagtctcactcttgttgcccaggctggaatgcgatggcatgatctcagctcactgcaacctccgctttccgggttcaaatgattcttctgcctcagcctcccaagtaactaggattacaagcgcctgccaccgtacccggctattttttttttttttttttttgtattttgtatttttagtagagatgggatttcaccatgttagccagtctggtctcaaaactcctgacctcacgtgatccgcccacctcggcctccctaagtgctgggattacaggcgtgagccacctcacccagccaataattattttttcacatatcatttggacatccctaagtttcactggtaatggggtaatggcaatctaacatttttcacacatatatatatatataaagtctgttgattttcctttctgaaatgctaacttgatatgtgcctcttaaggactttgacatgagcagatgatatggatgcttgcttccgggtggagtgagtgtctgtctgacctctagaatatgctctatttctgctgtgactctaacttagtcttaagaggagacttgactgtttgaacatttaaatactctaaatagtccactggcactattaacaaataaatataatggcttttaaaaataagcttttcttattttgcattacatgtgttacatctttcagttactgtaaggaacacaagtgaatagctgcttagattatttatgtttaaaattttatgggaacatagatttagattattggatactcaaaacacatgcttctcagaagatgatttttgtctcccagtttaatgatattatgccaagtattaatagaagccattttctatgaggagaagggtcagatatttaaggtaaatttctgtaaatgacagtaataaagcagctgctcagaattcaggacatctcaattagccctttgaaaaacaagttactgtcatttgatttcacaggcaagttcatctaggttttaggatcacattttaagactgcaaaacgaaattttagtcataaatgttttaaaacatataactagattggaggtgaaaggtcaaccttaggtcttgcccaggttcatttatcaacacaaatatttattgtgagattcaaaatggaagggaaattgagatgtgagataaaattatttgaacattttaatgtaccttgctagttcagtttaaaacataaaacagatggtagcacagcacaactgccctattgcctccctatttatgaacacccatttctaggagtccctaaaaacagggacaatgtccttgagatactgtctaattaagatttattttcttgtggtttatggtttgttttttcagttctgattcctttctgggccctgaattctgaattctcccctcctcacagtgaagatgagattccccttccccttttgggctaccaagagggagactttctgtcattgacagtggtaccaagtaatcagcttcagtgtcaggatgaaagtgccgggactcagggctctcctctgccacagtcactcaccctgcaggaacagtgagatgggtgctggtagagggaaggtcattatgggactgaagatggtagtaaaagggtgtttatcacaatgtcatttgtaataccaaaacattggaaacaatataaatactcagaaataatgagtttatagtgtgttcattaaaacatttattgcagatcttgctttggaggaatatttaatgacatgaaaaaattttcattatatgattaagtaaaaaggatttaatacttacagagccaacatcccagttctgttaaaaaattttcgttatccctccacccactcaaacatatatttttttaagctctaaaataactaataatttttctgattcttcaagaccaattttataatatttttaaaagaacattttataaaaggggagaaatggggaaaatgagagtaaactgtgaaaatgtacttagtcaccagattcagaaccatcatttggtgtatgacactgtctataaaagttgggtatttaagttggcttaaaggtattgatcatgcctctaagacttacatgagttttacaatagcaagtgttaaaaaatctgtatgtttactaacatgcctatgggtatcccagttttctaaaaaagtaaattggaagttttacaaacattaatggatggacaaatactgctaatttatttagctttagactcaggaagttttctttgttttgctaggtttttttttctggatggtggtaacagtttgcccatcttttataagttgtatatcagaaaattcttacctacatttcttcctacttgaatttgcacctgcctcagatctttttcaagtgttgttggttcctcacactccaagccccctataatttctattgttgtttccttagggtctctgttccaccctttcccccatgtaccctgaggtatgctagcgtgtttctgctgttactagattacaccttggagaaccgaaagctagtgttgggcctctacctcctgggaaaatgttttgagaaattcttccttctaaagtcttccagagtctcatatctgccataagaagataaactcaaagatgtctctttttaaagctgtcactggaattgagcagaattagagatgttttcaaataattgtctcatctggctactttaggtattttaacctatagtccttaaataaggttgatccattaataaatgacagcaaagaaatagtatgttttaatattttctgtcaaaagtaacataggtcatgaaaaattagaaaaaaataacattaaaaagtatatagaagaaagtaagaatcaaaaagtaataccattggtgaagaagccctctcaacagttgattggctaatactgaaattaatctaaactgatcctttaaggtctacacaacagagcaacagatttgtacatgttatgtgtgtgtctaagagtgagaatgactgagacatcagaacctgaacagtacaggcttctaaaggatgaggacatagagttacatagcactctgagtattgtgaacatttgatgagcagtaatgatctaaacatcaatgcaaagataaatacctttaaaacatgttgctgtgtgtttactcacagtagcttataacggtttactttggttgcaaaggctgttttttatatatacgtgtatgtatgtgtatgtgtgtgtatatatatatatattttaattgcatctctcacacacacgtatgtaaagatgtatgtcagtatggggaagatatagactatattcattttgctgttttggacctttcaataagaacctttttaaaagacacatcatggtgtgtaataaatacactcttgtgttttacttcctggcaccgtggcaaaaattaatttacagatgcttttcccagaacttttagatcaccacaaatgatttagagcatcaccatggctttgacatctgtttgtttccaactacatccaaaacacaggaaaaacgagtaacaagtcattgttaccataaacttcaaaggaataagagctcaaaatatttttttcctggaattttatcttgaatgttattaaaataacttgttcatcaatttagaatttgtgctgagatggtcatgttattcaaaatgaaaacatttgtttcagtggactggaaggagttgtgttacaggtaaaggaaaaagggaaaatgtaactctctcgttagatgacatgcaatagaatttttcttcagagtctgtgcagctggcttcttggctttttcttcagcagctcctcccaccatgcctggcctccagtgctgagggcgctggggagagagatgtgatttggctcaggcaggcctaatgaaaccctgcttgcctgtgtaataggtggatgatcctggacaacttgcttttgcttcctggcctcagtgttctctgttcataaagtagggattataatgcctgtgatgaggattaagtaaggtaacatatgtaaagctccttggccagtgcctggcacaaatagggcctggaaccaatagtgtttgcttcattctctttcctcaactctcctcttctgcctattgagtgggtgattatcagaggctcctctgtgcacaccctgtcttctctgtcttatggccactaccttttcttttttgaacttttaagtcttttaaattaaaaaatcaattcaaccaccatttatttagcaccaattatgtcaaaggtgttgtggtagatagcatagcacataaaaatgaataaaacagtttctatccttaacaagattaaaatatatgtgagaaaaagatatatagatagcaagcaggatatgatgactgctttcccaatgtataaggaataccagatttggttggggagatgagcttgacatgccattattgtgcactttcatctagaccttatttagatagacaatagaatgtactgtaacttttttctagtatacataaaattgagtactctatagtctctcgtcactacagtaaaggaggagtgaaaaagtgtgcaatcaacaaactccaactttctcagttatatcattgggtggtggacactcccagaatcatgtattacatattttataaagatttgtggaaaatattttcattaagttcatcacatatttattcatattaagaactgccctaggctttaaatttttaatttccaatttggatgcataacagtagttttactttttgaaaatctggtattctttattttctgcctcacctttccataaggaggacagttaccaattttgcagtatttaataaggatggtatttttggtactgggatgtccagaggaaatctgtaacctacatactgagctcactgctgtcaccaaagctttctacctgtgtctgctgttgtatgctaactgggacattgttcccaggattccatgtacgattgtgggcattgtcacctgcacaagcacaagaatgcctggtcgggggtgaatggagctgatatccatctcacactgagtcaccaagtcctgtacttcagagattgacccttcccatacagggtacatttttctaatttgcaagaaaggtgccctaagagctagtggcttccctgattgctcccctaacatcatgtggttaaattttggtatctcagacaagtagaggctgcggatctgcagggtcaattggcttcagatttagtcaatttcttgttttttaggcagtgaataaatatgtggttcccctcccccccagtttttttcttaaaatgaagctcatcaaacaaatgtaccattctgaggtgtgttctcaagtcatatattataattcatttcactcaaagtatatgattaaagctcattcaaagccctaagagttgggaatgaaggaagaattgtaggatgttctgctgtgccacaagacttaatttataccatttattagtcttaccaagtacattgaaaggaaaaagttgttgggggccaggcacgatggcttacatctgtaatcccagcactttgggaggctgagtggggcggatcacttgaggtcaggaattcgagaccagcctggccaacatggtgaaaccccgccttattaaaaatacaaaaaattagccagctgcagtgacatgaacctataatcccagctattcaggaggctgaggcaggaggatcgcttgaacccaggaggtggaggttgcattgagctgagatcatgccattgcactccagcctgggcgatagagcgagactctggctcaaaaaaaaaaaaaaaagaaaagaaaaagaaaaacgaaaagaaaatgcttctgggacttttcaagtatgccttgctattcagacattctcagagattaaccccaaaagtgagtgattatctccctgagacccagggttagaaaaataacttcagaagtacaaaagttggattattgccctaatgtgagcccactttaaagcaactaccataaacaatctaaagcagagtctgcaactgtgttagccatggtttaaatggtgccaagctactatttcccatggcaagggaaatgttaaactgtgaaagaggcaacagcccataaacatctatatctgcgtacacagcacagtggccaccagccgcatgtggctattgagtgcttgaaatgtggcgagtccaaatagagatacgctggcagtataaaatacacactggatttcaaatacttaggaaaaaaaagtcaaacatctcaatatttttatattcattacatgttgaaatgataatattttggagatactgtattgaaaatattattgaaaataatttcatctgtttttttaatgtggttgctagaaaattttaaattacaaatgtcagctgcatttgtgatttgcattctgtttctattggacagcactgatctaggtatttcaagagaaaagaaggtggggaatgtgtatttggtttcttcatggtctgtgtctcccaggatacaatatcctgttccctctttcttagaggcatgggttgtctccccgctaaaaaacaaggccatacagtatcactgatgacatgctttttccactctgtggctattctgcagttcacttagtatttagattgttaacttttctatgtaatctttgccacagagtgtttgtatacattcttaataattttcttaggagaaatgacttagcttttgctgcagattgccaaactgcactctgggtataaccaatttgctcttaccagatgtgtatgcctagtttgtcattttccctctgacctgggatttttcactttttgtttttgttgttgttgttatctttgccaatttgatagtgtgtgttatctctattagaaaagggaacacacctaaatttcacaccctaacatgagctgctcagtgtaaaataacaggagaaaatgatgaaggacagcttatcctaacccactttggctaaaggtttgaattaatttgcagtctatgcagaagagtatcagactcagtgaccattccaaattatacttttaatgaatggtcctctttgtcagctgtgaagaccataagaaacaaataattaaaaatgcacagaatacctggcaggatgaatcctgtgggaaccaatccgtaaatgtgccctagacacaaagggaagctaagaacagttaacattacatgtagttttggaagtatataatgaagatcctggggaaaagagtccttctcgactgggaagtttttaattggcatgactatatgggatacagttacatcaggattgtaagtccaattagccaagattctacgaaaatctgttctgtgcttcctgaacttgagaacaaatgaaaagaaaacccaaacatactttagctttccttcttttcatttagcgagagcaggaacgagttggtcttatgaaattgattgtcactgttgtctccagcacattaacattttttacacacaacaatttgaacagttctctaggagtttgctgtcctgtaactgtcatgtctgggtttgctgcatggtgtaacagtaagagcatctcagcccattggtgaatcggatgctgccagacattgctttgccaccctccttctcccagctactccatattctgagtaggagcttgatgttcctgcaaatcattatacctttgcattttttcacttggttcattagtttgataataaaatacatttaaaaaatttccccctaaatgatgttttatgcattctctcatccccttttcaagtggtggataggtccaccacatgccatttctccaggaatcatttctctctctctgttgagcttgtgtgtacaaatcatattctttagattctaaacatatcatcctctttcttctgcagggttgattggaacagattttaatcctcattactttgcttttattatgtgatgagctgaagggttttgacctttttgtttctgagataaatatccctttttttttttcacatttcaggataaaatcttaggtatccattatagctttaagtgtttgtctcaaaaactaccgttttgggttgtgttttcccccagaatcacttcaagtctctactcatattagtatacatttaaaacttgtgatttaaacttagcctggaatggtgactaaagggttgaattttaggttgaactttttctgtttcatctccctaaagaagggggctgtgttgcattatttccttggctccatacattcctcctggctcgggtccattcttggctctggtaatgatctcttcccttcttagccaacagtttccttaacacacatagtcactggaagtggctactcaaagagcttcagtggaacctgactcagactcgttactgaggacctaccaaataacctgattttattttctggtttctttcaactgcagtgcagtggggaaagatgagtcatttgtcccctctgccttagtttccttccttgtagaacaggattaatggtaccgcctttgccaggttgccgcaggcttggatgagataatgtgtcaaatgtgacagtacttttaaaactttgtcatagaagtcaagtacttgtcatagctctctcctggtttttactctgactgcccacatattcattgctaaactcattagaaataacaaattctccttctgttagctcatatggttactcaaaaatattttgttgagcacctaaaatgcattactacatcttattctccttttctgcaaaatctccttacataatgttgtgtcagctaaatggaaatctttaagtactatagataaatgctctgtgaacattgatggaggatttcctcattagaaagaatgaaaatgttgatagaactgagttttcaaaataatcattgtcaaaaaaaggatttataaatatgggcatctcatgtctgtggtactagaataagtgctgtaccactcatgttttcatgcatttaaaatgaatgcactttttatctcttttttttttaagttcactagagttcatgctgaaatgttatggggcttcatctctctgaggtacttgttggttttagaaaaacgggtttgttatctcctgagtttccatcacaacatctctctgattcttctatgattgtttcttctgttttatgctcagccactagaaggaaatttgatttttcatttaatggacctagaagtgcttattactctccaccacccatcctgtacttcactttccccgttcctgtcttattggctccatcagtgaattgtgtggtttgggaagagcttggagttaggtctaggaaatgagcttcagcttcaagccattccctgccttccttctgagttaaggtgtttgtgagaggaaacaagcaggggcctggagcaattactgagcccagtgtaggcttgggtgttaaggaggtcattatcaccttcttctggatgtggtttggaacagggactggcctgtggaagggtcccaggctggcctggtgggggctgacccaggtaaaacaaaacaaatattttgataagttgagctctgagcagttaagtagtgggaaagggcacataagttttcttcaggactgtatcatttattgtacctccattctacaacacatactgtgttcctaacaagagaatgggaattattattattaggatcacaatatagatgatttataatacatatttctcaaataacacaggagagataatcatttcatatccctgcctttccctcaactcgatctcaaagaaagcccacctaccctttctgcccccacctccatcatcacccagcagcctctggggtgaggtctgcaaagagtgaactcacctccacctgggttgccttacgtcttgaatcccattttaatgccagagctggtacatttactctttaaagtataaaatagtttatacttattttatgtatgtgtgtgtatagacatatgcacatatgagtgtatgtgtatgtctgtataaacactcgtgtatgcatttatacacatataaagtatgttttatatatataaaacattatatatataaaatatatgtataaaaaacatactttatatatatatataaaaccatgtcatgtaaagaagctttctggttccatgctttgaccccatgtcttcagtgattttctagtatcactaggatctcagctccccttggaggattcactcctttttggctctgaggggtcttttgacagacctgtaaaatcctgcatggatgttcaggacccatttttaccctgaccatttaagcatacaaagttaagtaagccctgaacaaagcgggagaggaagcaggaagtcagggcagtggaggggttgtgttctgctaattcagcaggatagtcacaggaagtgtgaggaggcatcattgctgataacatgctcacttcagctgaatcccagagagaatgaggagaaaagctaatcagatgcctccccctgttgtttgattttttttttctcttatgtggatttttgtttgtggcatggtcaattcatacaagattttacaaaattgtattgggacgtttttgtcccagtttataacttgaaattaaaataaattgaatgctgtgaggtgtggtttttaaaaggtatctttgccgctattcttttactcagtaattctgtacatgtaatcattatatttactgacattcatcttgtatcaacaagaagtccagtcctctttcaaagcagggatatcaaagcctctatccccaacccaccatattttagtagtttcctagatttttagattttaaggaccagtaaactaaacaaaaataattagggttagggatccagcatagagtcaaaaagaacacaaactccaacaaccaccatcttttatcactctttcttaaaaagaaagaccatttcactatcaaaaaaattagaagtacataatcgaacttaattttttgacaaatccatggcacctatttttctgctgacacagtggtgatcatctttccccaggttagtttttgtgaaaccctgctctgcagcaccctccctgacccaggctagttctgctagaaaacttctagtgactgcaaacactcgactccagttcttggaaaggcctgctttatagtctttccttttctaggtaagcatcggtaagaacttcaactgttccttccttgtaggatgtgatttctagctctttgtttatggtgcttactctcttctgaaagagctcagaagaccaggttaaaggagatgtttagaataattgcattcaatgtagaaaacacttcatgaaaacaggctgtcttatttatttattcctccactcctttcttctgaatgtcaaatgtttattattttcaggcactatgctgaggcctcatatacgaggaggaaaacacacagtccaagggcacacacctaatggggatgacagccatgcagataatgtagcagtgtgctgattgctgcaccaagatgctgcgtggacaggatgccatgggcagagtgcagagacagcactcagctcagccagggaaggtcggaaaatgctagagaatgccattaaactgagtcttgcagaaagatgctaaatttccctggtgaaggaaaatcttaaagggcaggaaattaaggtggagcagggcaggacagggacctgtatagcgatatacaggcaagctggctggagttttattcatttgttaagactgctgtaacacagtaccacaacctgggtagcttaaaacaactaatagttactgtcttacggttgtggaggctagaaatccaaaattaaggtgtcagcagggccatgctccctttgaaacctgtgggggaacatgcttcgttacctcttccagctttggtagtttgtcagcaatccttagtaagttcctggcttgcaggaatctctccctccaatctctgcctccgttttcacgcagccttctccccatgtgtctctgttcacatctccctcttatgaggacaatagtcacactggattagggcctaccctgagagactcatcttaacttgactacatcttcaaagaccctgtttctaaataagatcaccttcagaggtcttggggcataggacttccacatatcttttgggggaacacagttcaacccataacagtgagtgttggagaatggtgagcagaaaggcccaagagcatagtgtctttctatgatcggctcattttttttttttcagtgcaacctatattttagttattctgggaacttgaacttgtgcttaatcaaaagcaaacaaacaaaaaaaaaaaacatattttcatgtgaacaagccaaggctttttctaaatttgtacagttgattttgcccctttggaacttatgtataagacctatttttccctagtgaatgttattttattgactttggctaagtattcattctagcctgttgaaataattggaagtgttaattctgtcatcttacattcaccatccccctgagctttgggacatttatatatttgataagtgtgccaccaatgacctgatttatgtcattgtttaaaatgtcttttacaagtgctggccaagaacagagctatatggcatatccccagatgcctcccttcgtgttcaccatgaccgctaaccaacagttgacaactcaatcactcgttcatccagttacccactcactcaagccacatttcatcttcccaggtttcttcatctgatgtatgagcaaataatgatttttttatttaactcaaatcagaatacattatgtaacattcctaagcagccctgattttctcaccactccccaaagtagaaatagcaaaagtttaatgttcttacagttctggaggttacaagtctaaaattaaggtgtcatgacttgctcttaaggactttgctagtacttgttcttttcataagtgtctctgaccttctatttactaatccaatctagaattttgcctcagatcaacattggtcttatctgcctttagtttctagaatctagtttttttgttttttaaggaatctgaatagcattttgccatcctatcaacagctctcctattatgcaaggtttctcaaaacaagattggtaaatgcttactgacaatcatatagataagaagcacttttagccctgatctccatacccagaccctacacttgccaactacaagcagaagaacatcattatctggaaaacagtggattcaagctctattgagggtgaggcatgtttaccttcatttgggatatggtaattgtgagaaactgatactaaagtaattttacagcatttggtgctctttatagttacgtgttttcatataaagataattcctctctgattttcttgagtttcaagattctgaatttttggagccgtactatcctacctccgcaatgattgctcatctttatctgcagtatctaaggacagggtagtttgcagacaaaccagtaagaaatcaatacggggggctatgtatccttttccatcagatccgctcttacagctgtaaccattgtcacaagtgacctttgagccaaacgtctaagtttagaaacgtcaactctgctggcaggctgtggtagcattcccttgcttatacagtccaagtgtgtcttttactagggatatgtttatatcctatccccaaattttttagagctgaagtgagtaaaatagatatcattttccttgtcagtctgttcttcagactggcttttcaaggtcacagggcagtcaggatttattacttgagaaaaggatggactacgtttgaaaatcaatatgctggtggagtgttttggatcaaagccagcgttagtgttcagtcgaagaaatgtccaatttgactcttgcctttttagcttgtatcagaatcaagagaaatttctaggtaattttgcacactgttttaatagcttcagataactctgttttgcttcagagaggatgtttacttttactgtctgtcatgctgttcttgttttgaatgaagcagtcatttatggttttcagtgatggagtttaatgcattcactttctacagattctgacacagttatctggttgtgtatgtgtgtgtaagatttccagttgtgtgatttactttaaaaggagtgacaaatttagagacacttgaaaaacagtttagaaacgaaagcttttctgggttttttgcacacgttccgccccaccccagccccttatagttttgtttccgtggtgttgggggcggggggagggtgctaatttttaattccattttaagttcctaaattgccttgcttccctcctgtgattttttgagctaaattggcataaactataaggtcatattcattttctaaggcaaaatgtatttcccttctcctcactgctgccaattccccacaccaaacactttttgggggaaaatcatattacatgtttatattttattcactcaaaccaatgtatgttgagaggttacaatatgaaaaaaaaaaaaactgtgctgaaaagttacaaaaaagttgtgtctctcttttctcaatattttgccacattggatcacattgatattagggtaagaaggtagtctaggtaaatgctctcaagtctcaagtaattagaagtgcccttaattgaagggtatgggagaaaagaataacacttattagtcattgaatattcattatatgtcaggcaccatagtggtcatttataacagtgctgtgagggagacattatcatacaactttacagatgaggatcctgaggccaggcaactaactacaccagagtcacagggctgcccattggccatatcagcacttgatatggtctctctggtggcaactctctcttctttccattataacattgtcttccttatgtttcagtaaagttaagtagtatataaacacaagggtgacactgtcaaagcaaagaaaatacattacaggttttggtgggagaggaagaaaatttaagaaataattattgtcagttcataaattcaattcagaaatagaaggccactttctatgatcaaattgcctttgctttaaaagttggacattcatcagtgtttgagacatttagggattcatttttatgatagataatatacattttacttgcaaaattctgggtttcattttcggcacatattattttcctctgacatgttagtactcgggagcactaatttgggtctggccatctgtgactacatccttaagtgctgtagtacagtgacttctggtaaaaatattgtcataagataatgtaaatgaccttttgtgtgcaatgtgctcttaaaagaccataaaataatgtaaagctacgttaccttgattgcagatcataatagacttgatactaaactataatagcaagtctgtgtaataaatcaaatgctttataatatgctcttttatttagaagagaggttatacatttttcatagtctatggcaaaaaaatgcatcttagcgatttttaatgagatagttttagtgttttatatgaattttttagtccaagttatacatacagtaaacagcatcaattgttaccttcatatactatttataatggattcacccaggcatgttggtaagacattaacaggaatgattctcaatttagtgagaaaaggttattagtctcaaaatctgggtagagatgaccagtttcatttgtactctcaaaggatgtgttgatctgaaaatttcaaagttatgaaaaatcaggtatgtagatgtctgtatcttctcttgaaaaaatgtgataactgtcccaatgcttctgtaattcagtcttcatcagctcacatgctgtaaggcagctaggctagctgagagttagaccacatgaggattgtctgaacttctgctaaatcacctcaaatctgcaggctttgcatctgtggctggagctgaaattgttttcctttccaggacagttcagaaaagtgaactttgtgattctttttccccatcttctaaattcacagagacaagccactggctttccattgcacagataccatggattatttttctcagatgtcaagttaagcatttaagacttcttcaaagaaatcctttgtctttaatctctcctgccctgtagagcctttccattcaccccctccgtctcgtcatccctcattgtaatttcttgaacttaagtgttattgccaaagtacaaaaagcaagaaaataaataaaatgtggcatctctctctgctaatcctggacaaaaattttcgttaatcttactaaaataattgctcttgtgatttcattctacagttccaaatcctccagtctcattctgttctctctgtccttttcttagaatgcagagtcctccaagacttttggagacttaagtttccataactcactacataggtttgcattagattctttattgtcctacagagcccacctagatttttgttttctccagtttttcttactcaacttgaccttccctctatgtttatgcctcctttatttagcatacatcatacagggtctcatatttttagttattttttagtattaaaagttttttacataccccaaaggactgtcctccttaatggtaggtgtggcatctgctgtatttttcacaggccttgaaagggcatactgtaaacatgctataaatatttttgagttgatttcttggtttgatctctcctttcttgactgtacttatctttcccgtaatcccttcaccttcagcgcctggttttcagttgtttctgacctttaggtctgcagtagcttttcttgccaagcattctcctttaaaccctggcttcaattccagctacatacaccaggaatcttttattcataaaggtacactcagccatataacacaagtggaaggggcagctatctaatgtaagagttaggccagaacaaccaaatgaaatggggaatatctttctatacccttaatttttgtgtcttggaagtagaaacattgaaaatcatcagggcaaaagaggtaaatgtcatataaaatttacttgattttgattgcctaataaatttttacatcttctatctcatctccaaataccactttacatgccaagtaaataaaggaaatataaccagctgaattattccaggtagtgagaattcagaataacatgggtaatgaccctttctactatttttaggcctcattctccaaaaaactttatttgctaaacagacgtaatgtatactttgtgttccttcccctatccaaccactgttgaaagagctaaagcaagttttaggaaatcccctttgtctgggaggccattgaaaaaacaaagcagccaaaaaagtgagttagaaaactgcattcatctgtgtgtacatgtgtgaggacgtgtattgtattttttcttttttcccagcaactccaaaataacaagagggggtttcctcaaatagatttgtagtcctcaaattcatttccctcaaatagataccttagttattccttttaagctttaaagccagtcctgccgaccccctcactgaggtatatgctctactgggcatgttattccaagatagaccaatgtcatgtatccagaaggtctttagtcaggtaacttcttcctgaatgtcatcagcatctgtcttaaggaccttagcaattacggagtccacccctcatctccttactcttttggagctgtgtgcagagtcaaactgggaattactttcaatctgtggcacagtctgtggttggtgacccaagtttccatagctgtcaacatgcttggcctttaaactccaaagcaaacattctacctcccatctttgctacttagttgtgtaaccttgaatacgtcccttactgactctgctcctgagtttcacatctacaaagtaggagtaatactccacctccccaaaagattaagaagattaaaataattggcgcatatatatgtgtgtgtgtgtgtgtgtgtgtgtgtgtgtatatatatatatatatatatatatacacacacacacacacatctcgcttagaatagtgcctggcatagagtaggagctgtatacctgtaagtaattacttttattattcccctgaattaactcacgaggtcataagttttctgatgttgatgttttatttttctcttctttttctcatttcaatcccctgtccctcctacttgctaattatggtcatatacataggcacagcgtcttttacgggatgtgtgaatccctgtttgtccttcaggagcagctattatgaaaactatcattctatatgcatgagcaacattctgccctttctcaaagttaaagtatcttttttgtttatacatatcacttttttttttactgttgttttaaacacacccattgtgttttcaggtttaataatattcataaaatattctaaaactagcacaagcactgcaaatgaccccatgtgccttaaatgaatttacaactgaaatgaccaatattaaaataacttaacaaccattgtcgccatctgttggtggtggttggagtggacgccactctccagagctttggcttataacctggactcttcaaaagctgcacgttccctagcacacaggaaaattgtgtgtgtgtgtgtgtgcacgcgcacgcatgcttgcacgcacacacatacgtttatacatttgtacgtgccagtggataaagtctataatgatatgcaccaataatcatatccaggacttcaggtgattttaatttttcaacctacttttctttgtcttctaagtgtacaataagcttgtgtttcttttgtaatataaattaccaaaaaggtagaatttaggagtaactaagtgatagaggcagaggagaaaattaagctttatatactaagtgcaaactgagatatacctacattttatattgtagcagatgaaagaggagatctaaatggaaagaaagaaatgagtaaaactgtggtgtaaactaaagaagttttagtaaattctaagtaaaaggttttattagccaagctcacttgggccaagaggtttgaacatgagcttttacctgttatcctctccctttgaaattcatattattatatagtcatgtctcttaattactcttcatctttttactgtcagagcttgctctggagtggattatctactctagcaaagaatattataatctgggtagctggggctgtggtctaacccagttactttgaagccagatgaaatccaaagaatcttcatagtcacagtttttttttttttttttttctttcatgaaattctacatcatgctgtttggtcgtgcactttcttagtgtccttagagtgtgaattccgccagtcaggagacctgtttctcctagtacatcatatgtccctattccgtaacagtgattttttttttaaacagggggtctcactctgtcacccaggctggagtgcagtgacgcagtcctggctcattgcaacctctgcctcccaggcccaagtgatcctcccacctcagcttcctaagtagctgggactacaggcgtgcaccaccacgtccagctaatttttgtattgtttgtcgagagggtgttttgccacattgcccaggctggtctcgatcttctaagctcaagcagtctgcacacctcagcctcccaaagtgctgggattacaggcgtgagccaccgtgcctggctgatgatttaaaaaaaaaaaaaaaattaagctacagataggagcaaggggaggtgaagatctggttgctttatgaatttgtacccagatgtctgttactcttacaggcattggtgattgacaacagaattagattaaatgttaactgtctataacagctccccctcacccctcactttaaatcttactgcaagtaaaatgagtagagagagatgatgactactgtgaaccctcccactccttatcccagtccctgaggtgccatttgatatatggctcctcctcatattctagatctggacctttcctggctcttttgtcatgacatcaaaaactactggttctatactgcattgccacaataagatatccaagttgcccactgaggagctaacttagctagggcctgacggatttcaagggttgcatcttctagttctggggtctgtattttaatgggagcctcttgtgctggaagtggtataattgagtggacagcccaaaagaagaatattttaggaaagggaagcccttcagcaccttaggtaaatccaaataagcagcttcctgtgccacttgtttgcagaaggccagtatgcagctgccccacagacagagtggaatccgtttctgatgttctgtgaaatcacagtctttcagtcttactccacaacttgcaaggaaaaccacaatagaaagtaaaactgataaatgtcagaaatcactctttttctactcaccatcctctgtcttgttatccctctttcaaccataagccacgtgtttatttcttatgtttaaaacaaatgagtaaaaaatgtcctgtgcttggaaaatgaatatttgagtaccgtacagaccttccattacccttcttcttccatactcagagggcattgtttctcaaaatcatttcattgataagttgccatgaaaatttactcatttgtgagctctgggatttcaggcaaggtgtaatgctcaaaacttgtatgagctttttgttttctcatatgcacaaatgggaataataacacctacctcataagattgttgtgaagttaattaaataaaagcatacatgcaaagtacctggcacagtgtctaggacataagtaggaagtcaacaaatgtaatgccctttctagtttcttagaaaatagccaactaaatagttgaagagattagtgatagtttcatggaaaagataatgtttgaacaagttcttcaagttcaagcatgggtagaataggtaatggagagatgtttaaaggggtatttaaggtaaattaatgcaacagacagggttgaaaagctggatgcagggagaactattatgtgttttttgcatgtgtctaggaacagtgaagggagaaagtaaagattggaaacatatcaaagacaaaatttggaagagttattgatcacctgggttcaggaattactgagttagtggtggcacgaggaccccgagcttggtaggagattgggagagtgagtgctagtgaatgaaaagagatatggagagagacagggaaagccatgtttgagataatattgaagatgagatttagaaagtcgtgggcttgatatttcactacttaaatatttcactggatatttaagaatcctaataaaatattaaggtatttaagtagaaagaggaagagagaaaaaccaaagctttggtgagttttaaaaaaaacacatacacacacaaggaagaactgagcagcatcagaggagattcattaattaaaaacatggcactgaatgaatttcctaagagaagaaacagttgaagaccaaatattaaacttgatgaaagtacttagttaaggagggagaagaggaagctgaatgggcaaagaacccctgaaagagggctgtgaaagatggaatgagatgggggagtacctgccacagagaagggaggtgcactggcagagcggactcatgccagatgtagcaaacaagctgagagagggtgtggcatggcttgcattcagcactactgagccttttctctttgcctacttcctcattcccctttctccatgcattttcctgtctttcccatcattaaatgttgaaagcagaactagaagtgtcgaaggccaaccctttaccttccttctcctaaatgagcctttcttctgtttggtttacaaaatgccctgaactctgagagcttgagcagtctcttaatcactgtgactctcaatctccttaccccaaattggagtcatacctaccgtccccccgcttttggaaaagtatgaaacagggatacagtctaaaagtgcttttgtcaaggacttgtacacacgagagagtcctggtgcctttgtccatttttcgtgttcctgtaaaggaatacttatgctaggtagtttgttaaaagaaaaggtttatttggttcgtagttctgccggttgtacaagaagcacagcatcagcgcttgctgcttgttgagggcctcaggaagcttccactcctggcagaaggcaaaggggagaaggtgtgtgcagagatcacatagagaaagaaaacagaggaggaggtaccaggctctttgcacaaccagttctcaccagaactaatagagcaagaactcactaccacaaggatggcaccaagctattcatgagggatccacccccacaacccagacacctctcattaagcctgatctccaacattgggagtttttgttttgttttgagacatggtctcactctgtcacccagactggagtgcagtgacgagatcatggctcactgcaacctctgcctcccaggctaaagcgaccctcccacctcagcctcctaagtagcagggacaataggccccgcaccaccatgcccagacaatttttgtgctttgggagggtagagacggggttttgccgtgttgcccagcctggtctcgaactctagggctcaagccatccgccggctttggccttccaaagtgctggtattacaggcatgagccaccatgctcagctgggaatcatattccaacatgagatttggatgggtgaaatattcaaacgataggagctggtaaatatcaagcatgtaacctaggtagatagatggttgctgaaaggttgtctttagatcacttatttttttctcatttgtagatttttatagattatttctttgtaagcctagtgatctgtgttaatattgttaaaatgctcagaatctcaacagggaattgaaggtgtttgtgcagcattatgcctcttagatgtaattgtcatttgaacctgaaattatctttactttcatgcctagttagtaatcatttgattacatgattacacagagtgaacataaggaagattaactgaaggagagaagtggctcaagccatttttttttcttctagataaatatatttcagcttgtttcagtgcataaaatacaagtgtgtaatattcacaatggtttaaaatgctacaaaatacttccatttcctaaaaattttaatatgctttttgtcctcaaaatcattcatgagaaaattaaagtagagcaaatgtggaatttttgaagtaaatgtctaggaaagtagactgtaaatgaggaaacgtgagactcagatgcatcgagtaagttaaatgcatttcccagagtcttactttgatttgatttgttttgttttgtttttgagatggagtcttgctctgtcgcccagggtggagtgcagtggtgcaatctcggctcactgcaatctccgcctccccggttcatgcgattctcctgtctcagcctcccaagtagctggtactacaggcatgcactaccatacccagctaatttttgtatttttagtagagacagggttttgccatgttggccaagctggtctcgaactcctggccacaagtgatccatccgcctcaccctcccaaagtgctgggattacaggtgtgagccaccgtgcccagccttactttgatttttaagaaacaattttaaaagttatctttcaaaactttttttcctcaatttttagaaggcaagcatagataacagtgcttttccttatagtatggccactatggagagagtgtggggttcggttcatatttacattatactgtcgcttcgttttcagtagcagtatgctaaattttaatgttcttaatttttcctatattccccagcatctatggcacataaaggaatttgaacatatttctcatagaaacttcataaaattaatgattaatccctgattaattcttatattcttcttcattatattcttgattgtccgtttcttagacacatgtgcatgcacacaaagtgagtttactgtataattattattactgagttacaagtggtgtaaataagtgtatttatgaacagttataaaagtcctcagtaaaaaggatctgtttgacaccattaagtgtgctaaacataaacatgcgcacacacctgcccttctgtggcgatatggagccttgcaatggtgtccacagaaccaaaatgaatagaataatgcaagcagctttccgctgttactatttcataaaagctgtatggatcataggacagtactttcctgttagaattctataaccttgcatttggctttgtattttaccactgatatactgttattagaagaaaatatttggtatagagcccacatcccatgtttctgtcctaagattgtcaggtaagtacttgatttcttcagagttgaacttcaaactgcaatcccacaattcaaacaagaggcctagccattccctttttttcagttttgagttcagaattctcatttcctgtctcttagtaaagaaaattttgtactctaaagtttgcagatgtttgaaaagaatgtgtgttctttggatttaggcattaataagggttccttataacttctttttctttcttttctttttttcctttttttttttttttttttttttagatatgggaaaatagtctccacaaaggcaattttggataagacaacgaacaaatgcaaaggtatgttttcttggctggttatttggtaaatgatagctttagaaaaatgatggaatttaaaacctgatctttggtttcaaaaccaccttcgttttattaaaaaccagatcttatatatcacccagtttctgtcttgcacagtgtcagcatattacttacatttgtccctggttgggttttggctacaaacccaacagcagctagcagtttgccagaattccagatttgacgccagtagagttaacatgcaaaatacgggttggcatttagcccttgcttttaaaaggggagtagagttagaaaatagcttttctttcctgagcctgaggagattagagctgcttactgaagaccattggactgtactaaagaactgaaaagattacatattgtgcaaattggctctattaattagaatagagtagttttaagcagtacttaattacatgtttcagtactcccaattgttctctgctgaatgcctgttgacaatattggcagcagggaggagacaaccattttcactgaccaaattgtaatagggaggggaggtcatgcgcccctttgaaatatgctgctgcattaatttgatgcactgaccttcagttttccatgtaattaggatgagctcatccagccccatgagctggaagaggaggcgtctacagtaggcagcactgatgctctgtggttctgacttttaatgatccagcatcttaacaataggcatgtgatttctaggaaaagggaagaatagagtcagctgactttgaatctaactactgaccccatgaattgaaataagttgacaggaataggcagagaaggcaaatctcctcgttaattagaccccagtttttcaagtagtggtgacggggcagtggcttagcacaatctgaaaaaggcagagaacataaatgaaccctatggtaggggcctctccttataagccaagcatttcctttaatctagacttgaagtggttcattgtatttctgtctcttcttcaaagtgcctaaatttaaaggagctattgtagcaaatagctaagctcatgtttaatcaacatggcacattaaggcaattttgccttgggacagtgaatagagcgtgctttatgtagagtggtacccaataaatattttaaatgaattaaactagagagagtcaaattatagactgaaatgcatatacttagtttccaaggttagtcttatttaacatttataaatgatttgggagagcagagacacagaaaaaaaatcttttggttttataaagaaaaatagactcttgcaggaataaaaataggaggctgatcaccaacatcactttgaaactagagagaaatcagagtagacaagtggttttatccataccctacctcctctctttttcttccccaccccaaaagaaatcttaatgtcggctcagtgtgttaaaaagcagagctgccctaatttaagtaaaagaaaggacccagaggttgaatgcttcaccacatccctgaactgaaaaccacactattttacactctgctccaaaagcaacctattccatagaagccaaaattcctcaaagtgctctacgtgatctagaaaaggtatgggtaaaaaataaactaatgctaaatctaacatgttgtcacaatacaaacccttaacagttggtaagggtccatagtagagagatttatggacttctaagggtaggactaattcagaacttattttagatacaagaagtctcctggagaccttcctttaaagtggtttttgggagacactgcttttgggtgtgtgggcagtaatagaaaccttccagggctctctgcttcacacaagcctcccagcaataggtgtcaacagatatctggtgggttgagacggtgggtgagtgagtgagtggagagggtaagagtgggtttataaaatcctagaagcaagaaaaaagtaatttcaggacaaatgagaagaaataacacttaactcatgataaagttagataacatgttacccaagataacttgacgtgataggtagatagataggcatatagatgactgattgataaatgaatataaataaataaatgcataaaagattatagaatattaatataaatgaaaggtacttgtgttatatactaattttttgaaattaagcagatcaaaggactttatatatgggaatgagagatcttagagggttacagaacattttttgccacaaaacatatttttggaacatgtattttcaagagaattaagctgaaggaaacattagaataacatgtacctaagttattaaattttaaaattcacaattcagttgctattttacatttcagtttctctcaaagtttagccaacaaaaggcatttataagccctccaatgctggtaaatatgtcagttcaggacaaaaagaaaagctcacaaaagattggttatgaaattgattgattcattatttatacttacagaagtgcatgtaagaccagaatacttatacacattagcaaaaatagtttcaggatgaattagactaacaggaaaaataagggtaaaagcaggcagctttaagttattaccaaatgtccctgtgtttcctgctggccaaggcaaaaatagaaaacatagctcgccccatgattcagtcatcacaatgtgagaggagagcaggagtaacataactattcctggtcctgaaacctgagaggaattctcctgggaagcctcagtgagaggatgccatgttatttagtgaaccctgccttcaaaaacgtctttacacctatttatataatcaaatccatagagtctgtataactcaaattgtatattgtcttctatttacttgaaagtaatacagatagacagcatgaaagagcacaaggttgcatacttaactattatgtttgtcttcagcaaatggttataaaacagccatagtgtggtaggcattgggaaaggccagaaaaggatgtaaacagttaactaaaatgcaggcattatggatttctctataagaaaataacagataacagaatgcaaatattacctgagttgatagtaacttcaaatacaataacatcaaaattgagatcttctgtttactgtaatttgttgacaatagcaaaattgaaggaaaaaacttaaatatccatcagtaaaagctgtatcatttcattgtagctgggttctcatttatgacctgctgaaactatatgagagagagagagtttgtgcatgtacatgcctgtgtgtgtatccacagagctttgttgcgtgttagcatggacaacagatgtctaaaaaaacatccaagatatgtttaaccttatttctaacctggtagttgagtatcattctttgttttacctagatcaacctcttccttttgctctccagcctggctatttctctactgtctaaatcaaattaagccttatttcagcccaattccaagtaatatataaggaagccgcttcttgtttcagctttaacattcatctctcctgaaacatctatttctgtagtcaatagtctgctccatctcattataacttatttcgttaccaggcaatatttttggtactaatactgcaaaactgactttgggctgtttctgagctttctgtttgactttattgatgttgattttgtcactagtatcatactatctaaattactactaatttagatagaaatattacttagtaatatttctgtaagtaaatgatagggctagctcctcttctaaacaaccttccaatgatgcttttcttttgcaaagtattcttattcatttacaattagtttgagttccatggaaggctctggtattttgcctggtaccgtttcgttagtctactaaatataacttgacccttttctcaataacttaagaattatcacagtgaaaagtctgtgattctctattttgatacggtgatactcatgggatctgttgagattcatgaggctgttagtgcttatgctgtgtaagtcctattctttgcatagtttttctcttttattgcttgttagtagttttgactgttagatgccattcatatacttactttgtagcagacctgccatcaccccagccccccttttcccctaattttctgcttttgacttgttgtggcctgggaagacagatgaccagctcattaaaaatgtttgtaaagctatggataaggaaactttgaaccagagcatctctaaggaggttatgtgtttgttttgttatgttttgtttttagactttagaacatgaactgccaaaacatattttaggtgtcttgaggcattttccccagctcttctttattttgaaggggtgtgatgagctgtattttaagaaaataaatatgatatctttaactgagtactaaactttagattattttatattgggggtgtctaatagttgtacttattcaaatttttaaaaatacaagtttatctacaaaataaacataatttttgtttctgtcatttgtaaactctgtaggatgtctccatctttcttaccgaatcattaaaatgctatttccctgaagttgattattttttttcttcctttttttttaaatttcttttttttaaacttggttggcaacttagatgtctcccccccaccagtaaatacaagacacgtaagatcttgaatagggaaacgctggttctttactcccccaactccctctgaaggcaggcttgtctgtctggtgatagacgacagggaagaagggcccaggaggccactggcctgcagctgttaacgcctgagctccctcaggacattttcatgtctcttgcccacaccagaaacaaagtagagctgttcttttacccttttacctaaccacagaataatggcttaaatactaagtgtgtttttgcatttcaggttatggttttgtcgactttgacagccctgcagcagctcaaaaagctgtgtctgccctgaaggccagtggggttcaagctcaaatggcaaaggtgagttgagagccagcaattgcttctctgttccacagctttggttgtgaagcccgacaggtctgctttttctatctgcatctgtaatctccccttcatcccactcagcacagcgccttctggacacttgtcctgtgcctccgcagcctccacagtcactattgtgcaaaggactgttccttgtaacttaatctatgaaggaggatttataaatatataaaatttacatagtaaattatgtaaccccataagtaaattgagaaatagcagcatattttctcaggtaatcaggtatttgtgagtctttaagatctgtactgttttttttttttttaaatttaaatgtcaatgcccagggaatgaatacacttctagacatgtttcaaaagataattatgtatagcatatagcatattctatttcaaaaatatatataactggcacatacattatacaaataataaaacaagtagttttaatgcacatgtgggctacagatgctatttttactgtgcaatagtgagacatttttaggtattgattattaatggtatataaatctactttttagtagttctataatgactttattcaaaatttatttctgatgaacttttagcatattttagatgagcaatattgttgaaaatttcttcaagtgagtaacttgcttgaatgttaggggattataaaatgggagaccatgtttcatgcttaatatatattttagcacagtacacatggatgttaattatgataaggtacattttttttttcttgaaaactttcatattatggtagtttccctctacggttttgacttagaatatcacagtttctggatgtaaatggagttgatcagccagtcattgtgtccttctctttgcattaggttcatcctgaaagttagtttaagatgctcagaccctcttccaaaagtaatgatgccttagatagacttgatggccttgaaaaagttggccttacatgatctaaatccctagttcaggtgcagtcataattctaaagctggagggaccttagattgtcttgtgcatctccccccaaccccactttcaaacgggcatggcctttttattaaaagagctaaggctcaacaaggagagtcacacttggaatgacatgcatctcttaagtgcttacattctataatacacattccattatgcaccaaacacatttaggagtctctgttgaataaactgatatttatgtcccagtctttattacccaaatgtaattttgcattacatcataatacctactgactacagtgcagttattaagacatctgtgtaattaattaaattttttaaaacctgagttcttcagttgctacagaaaatattttcaagcctgaaactcagcagtttgatcttttgagtattctttttaaaagagcaatacttttatattatctggcttcttcaagtaaagaggaaagtaacaagcctgaaactcagcagtttgatcttttgagtattctttttaaaagagcaatacttttatattatctggcttcttcaagtaaagaggaaagtaattttatactgtcttctgctacttttgaattgtagcacgtaattgttccctgagaagcatttacatacacataagaaggttcatagaagttaaaggactctggtaagcggataagttacctcccaggaccttaaggatgttgaaaaaccagtgtgaagctatagggtagagatgtactttgaatgaaagaatcaacataaagatttcagtaattagtaagaggaatcacctttctaagtagccgttgccatttaatatttttaaaactttgcattgagttggacttactttagattttcttaaactccagagtaagaagttaaaataaacagactatatatatatatatatatatatatagatagatagatagatagatagatttttttttttttttggagacagggtctcactctgtcacccaggctggagtgcagtggcacaatcttggcttactgcaacctctgcccctccaggttcaagcgattctcctgcctcagcctcctgagtagctgggattacaggcacatgccaccacacccggataatttttgtatttttagtagagacaggattttgccatgttggccaggctggtcttgaactcctgatctcaagtgatctgcccacctcagcctctcaaagtgctgggattacaggcatgaaccaccacacctggcctcatgtgagcaccatgattttcagattatttgtccatcgcgtagagattctctgtgacattattgaaagacggtgattatgaggttttaaatatgtttattatgactatgtgatacctatgttgcataatgatttgcagaatgtttaatctggttctgtaaacaatgggtaacccggcattgtataagcaggacttttagggcacactcggaaaacaacttacttctttcccccactgtccgttctattaataatgcactcactgaagctccttgcttttggataaaatccagggcaagtctcacgacttctgcagccactgtcgttatttcaagaagttccccaagcttctttcgtttcaggtgtttctggttgatatgtgtttggtagaatgcctcaatttttcatagccaaactccatgaagcgtacatatgtttcaatacattttcagtcagagtctcaagttacatagcaaatacagtttatagaatgtcagactcatatgtagatgtttttaaaactgctgagagtcaacataagggatgtgtgtcttggatattgctgatgctgagagacatcacagcctaaaaagcaattgttggctgacaaccgtattatttggtgatcaggcagcagtgtttccattccaacagaaccatttgttatatgtgtgcacacacatacagagacagatgtaatgatgagtgtatttagttacattttagggaattatagaaaaataggaaaataaaatagttacattttagaaaatttggttgaggattttgactgatgtgtaatacattataattttttcctgtttaacataatgtgaaataggctctcggttaacattttgatgctgaatttctgattttcaggaacagattatgatgttaagtgtgtgtgatgcctgtaatttaatactccagtactgtttatttgacaaaaattttgagtatcatgtagtgaatcttcagctgaagcttctcccttccctggattaggtctgctccaagtagcaagcttatagtgagatgagcaaatgattcatttctttcctatttccaaagcttgtgtttttctcactcttccttcagctcactagccatggcttcatttaacccctccagggatggtgtgctggaaaaggatgacctgacagtgaggtcatctgatgttgatttttctagccaggcagcatgctgatgttttctctcatggaatgctttggttttctgaggtctttaaccaactccatccccacctccctaaattgatctttctctcctatagctccttgaagtgaaagaatacatgtcctcaggttgacatggtcagctcctgataatctaatggtctatcttcagcccctttctgctggaatttcttcccctcgaagcagccttcttgggaggatctaacacaaccctgggccaactctacctgtgtggcccacatctgatctacctttgccagtcatccttaggagagagttacttcccagccatacttgtcagcctttcagcctttctccttgaagattcccttagattttaagttagacatctatctattgtatccattcaggttcctgagacacagatcgagctccctgagtggtcgccctctcttgcttgactgatggtgagaggaaagcaattcacatggtgagacttggaacgcttcagcgtttctctccccataaatgctcactctcagtctccccagtctcttagacataggaagtgagcagtcagttaagtgtcccaaaccagttctcagccagcgcctttcaggctgtctttaggtggtctgatttctcactctggaatgtgggagtgcctgacacccattgttttgtggtctccccttaaacagaattagaaagagttctattttagcaatctgttaagaatgtagaggcttcagttagagtggcccctgaacacttacctaggcaccattttcaatgcctgtaatattaagcagcatagaatattaactatacactgttttgaagaagcctttacaatgcatttattcaacactggactgggtatatattggcactatatgtcgtgtctacagcgctcttcaaatactagctttcccccaggttgaaaatgagcactgttcaaagacctctttagaaagcttgatactatacattggctaaggaaaaggaccccttcctccatcatctgtggcgaggaccagtactcaggttcagaggtgctggccagctgccaacattctgcatattgtgaatttctttaggtccctgtagaatgacttgagattcctagacctgatttcttttttatgatatcattatagttacaagaggtattttaaatgtcagtgggtttattgttctataccatagaaccatgagtttgagtatctagacttgacttagcccctttatgctgtctggataaaggagcacctgaaacacatctttcagggagatgatttttgttttgttttgttttgttttgttttgttttttgagaccagatctggctctgtcacccaggctggagtgcagtggggtgatatcggctcactgcaacctccgcctcccaggttcaagcgatccttccaccctcagcttcctgagtagctgggactacaggcacgcactaccacacctggctaatttttgtatttttttgcagagaccaggtttcgccatgttgcccaggctggtctcgcactcgtgagctcaagcaatccacctgcctaggattgtaagcatgagccaccacacccagtggggaaatgatttttaaaaggagtttaagtccagcccctgtgcttgggtgatagggagggtacccgtcactttccactctcctctaatgaactaatcaggaaaattcatattgccatatattaaagtctttcatctttatataatcagaaaaaaattaagggcaatcacttagaggatgggacagaaatataatattgtttgacatactgggtacctaagttgaaaaagaaccccacaaatattcaaaactaaattgcaaaactgcaaaatgagagcattagagaccagtggttggtttttattcttgttttaattttcagcgctttgtctggtacctgccatgtggcaggttttaagtgtttgttttgttgatgatcaaataaaataattgagaaaataacttttttccaagcttgggcagatattgagaattaagaaagggacagtttaaaattatatccatcaagtacactgatgaaacttaacctaatggccttgggccttttggaaaacctgtttatgttaaactaggcaaatgttacaaatgtgtacatctttcaaataaaagactcacattctataaaaggaaaagaaacgcagataacgagctacaaagacagaaaacgctaatggacattgtttatatctattagcaaagtggcttctgtaggcctttcatttcctcctatggcctgatgggggtcagcaaatcctcatatgttttttggctgttgggaagtttacactttttttttttttttttttttcaataaataggcagtcacacgagcaggaatataatcccccctctccatccagagcttcaccatgctctgagcagtttgcagtcacatgccagtgactggctatctgctggttgttgaacctattctgtacaagagaaaacagatgtctgctcttactgccaagtccccgttcttgcattttaggaaccattccacacgcacggggaggtttttgttaatttctttcggatgatgactgagtgctttacgctgtgcaggacttccgatcctggcttttctactcacgtgaacgttagtagctgtttatcactctgacggccaatgtgagatctagttttctacttgttatggaagcccttgaacccttccatgcctagggacaaaggaggcctgttgaccctatttttatgtttggtcacctataattgaaagaataagtgtttttttcacacatagcattgtaaataataaaccagttatggttgtcactgcttttaaagatactaaactatcctcatttcaagaaccaccaccagttatcacatgcattatatgtcttgttcacagtgaatgtgtggttataagaatgcatagacaacaactaaaaagaaagtaaaatttaaaaagaaaaaaaaaacacccgtgaaaagaagggattagaaaaaaaagaattcatggacactttgttattttgtggcatgtgctgccagcttggagtttctttccattcttttttttttttaaattactgcaactttgtggacaatgtttgtaagatatgttgaccgtttgaaaagaaacataaataacattagcgctaaaggtcatcccaaatgaaattaggtttttaaccgacagggtcgttgctattgaaaacaaatgcattcacatcataggaaatacttacctgcgttagtctactctatttcactatatcaaagagtgggttaagagcccagttctttctgggattctgatttatagcatttttaaatattatttcctcatcggtaaactttcaagttgaatcaagactttaaagcatgtgtaatatttttaataatattttaataacagaagcaactaaaacacagatttagtgcctacattgtcgatccccttctaaaaattcttcatacataacaaattctcctatgaacattcttaaaaagaaagtccactccatatatactccatatatatgtgtatacacacacacacacacacacacacgagagaaacaatcttgctcttgcccaggctggaatgcagtagcatgatcacaactcattacaaccttgaactcctgggcttaagcagtcctcctgcctcagcctcccaaatagctgggactacagatgggcaccactacatctcgctgacttttttttaagagatgaggtctcactgtgttgtctaggctggtctcaaactcttggtcccaaatgatcctcccaccttggcctatactgggattgcaagtgtgagccactgtgcctggcctcacaatattttgatatgtgtttcttctgtaacattttttataccatatctctgtccaaagagtgttttagtgccctttaattaaggggtccccatctttattaaaagatagaacctaaaatcaaaactaagatgggtttgatcatatcattcccctgcttccatgccgccaaaaccgccctatttttcaagatgtagctttcaaactgcagtttcttcttcctcctgtttccccgtcacctaccagtgtgcaatcatgtgttgcttaatgacggggatatattctggtgaatgcattgttaggtgattttgtcatcatgtgcacatcatagagtgtacttacacaaacccagatggtgtagcttgctgtacacctaggctatgtggtatagcctcttgctcttaggctactaacctgtacaacatcttactgtactgaatactgttagcagttataatacaatgataagtatttgtgtatctaaatatagaaaaggtacagtaaaaatatggtataaaagataaaaatggtgcacccttatagggcacttaccatgactggagcttagaggactggaagttgctctggatgagtcagtgagtgagtggtgagtgaatgggaaggcctaagacattacactgctgtagactttataaacactgtatacttagactacattaaatttattttaaaaaatttctttctggccaggcacagtggcctacacctttaatcccagcactttgggaggccaaggtgggtggatcacaaggtcaagagatcgagaccatcctggccaacatggtgaaactccatctctactaaaaatacaaaaattagctgggcgtggtagtacatgcctgtagtcccagctactcaggaggctgaggcaggagaatcgcttgaacccgggaggcagaagttgcagtgagctgagatcgcgccactgcactccatcctggcacagagcaagactccatctcaaaaaaagaaaaatttttgttcttcattaatgaatcagcttattgtaacttttttactttataaacctttaaatttaagtttttgacttttgtcaagtatgtgtgttttagcttaaaacacatacattatgcagctgtacaaaagtattttctttatacatttattctataagcattgttctattttaaaatctattatttattattttctaaacttttttataaaaaactaagacactaacacacacattagccagggctacacagtgtcaggatcatcaagacattaccaggtgataggaagttttcatctctattacaggaccaccatcgtatatgccatccgccattaactgaaatgtcattatgcagctcatgtgcgtaatatcacaagataagcatggcttatcttcctggagtgtcggtgttacttactggtattaggtcaaaaacattgtttctctattaaaataaacttagataggaagtagattgcaaaatttacatgacttttttttaaagataaaacacaagacttcaagaacattttgcagctctggcaagactaccttgccttttgcctacagttacataattattctccttgcttttagcactgcttaagtaggaaagctgaagcagtagtgactgacaaagtaaaatcaaactccttagatagccttttgcaagcctcttgacttctgcttgatctttgggtcccaagtcaatgccatgtcctctgaacaaagtatttcctttcccatctactcttgagttcagcttttccaagagtctaaaattttccctacccagaattgactattttatacggctttgttatttcttgttttcgttaaattacctgtttttactgttggtgatcatgactcaaaagtagtgtgaactttgccatagagcagaggacggaaatttaggcagatccctattggatgctagatgacttggtccagaatccttcatgtatctctaagttgaattattagcaataattaaattgaaataatagcttcctgcgcaatagtgtgcctgaaatggactcctaaaaataacagtggaggagaggtcagttatttttagaaacaccgcaaacaactgagagttgtggttccatgagggcatcctctccaactcagtagtgccatttccagatctgctaagaagggcttggtgggatcgtgtctggcctgcacagattgtccaagcttcagacactattttcaagagtccagggtgactttggtgttctgaggttctgagtactttaaaaggacttgagcaaagaaagtagctaataaaaataggtgtgttaacataaatatctcaccttctgttggaaattaatggacaacactctcttctgttttagcaacaggaacaagatcctaccaacctctacatttctaatttgccactctccatggatgagcaagaactagaaaatatgctcaaaccatttggacaagttatttctacaaggatactacgtgattccagtggtacaagtcgtggtgttggctttgctaggtaagccttctgcccagtctttattatgtcaacaacaatagctttgccaagttatcttggaaaattaaaaatgactaagaagagacagtttcagctagggttatgggagcagttgcactgtgaacttaaattatgtgtaaataccagactgcatttttccagatcttttgcaagttcattagaattcatgaagctgagcacactaaatatttgggtccttatggaaaggaactatcacatgagcaaaagttctgaacgtgtgtgtgtccttagatcatcaggatgcttctaactttttaaaaataacagtcagtctcctaaattcaatagataaatcagtatgttttttcttattcgatggaaatttgattcatcaataaagtaaatgagttaggttttaaaatgaaatatgtaaaacattcagaaaagtaagacaaggacatgataactgtgtaaccaccacacagatatgacaaatactaacattttataatttctatttcagatttttttttttttttgtgagaaataaaacctaggccaggcatggtggctcatgcctgtaatcccagcattttgggaggccaggcgggcagagttcgaaacctacctggccggcgtggcgaaaccctgtctctactaaaaatacaaaaattaactgggcctggtggaaggcacctgtaatcccagctgcttgggaggctgagacatgagaatcgcttgaacctgggggatggaggttgcggtgagccgagatcacgccactgcactccagcctgggcaacagagcgagactgtcttaaaataaataaataaataaataaaatcttctaggggccgcatgcagtggttcacacctataatcccagcatttggggaggccaaggcggaaggattgcttgagcccaagagtttgagaccagcctgggcaacatagtgagaccctttctctacaaaaagtttaaaaattagccaggcatggtggcacatgcctatagtcccagctgcaggggaagctgaggcagaaggattgcttgagcccaggaattggaggatacagtgagccttgatcatgccagtgcactccagcctgggtgacagatctgtctttaaaaaaaaaaaaaaagtctaaaagtctagttatagctaaagtgccctcactccttccatctaattttttatctttttctccccagaaaaaaaacacttcagagtagtggttattttggtttctgatggaaaaatactaaatagaaagctctttgattttgatcagaattctaatctaaaagcccatgtataaaagctgatttttatatgatgcattaattagaaacttattaatactctgcaataacaaataatgtgtatatattttaaagtaatgactttgattttgtaggaagaatttctgagggtttgcttttatacacaaatgacaatcacatcttacctcagacctgttatatatcaacaaagcattattattatgttgttttatatagaagaaaattgagacaaaaaagggaacttttccattgttacctaactgccaaataatgaagcaggggctagtacttggttcatctggattttagttcattgctgtttctgtcaggccagttagttttatcataaaactaaaacatcctatgagtagtaagtcaccaaggccagcatctccagcatgtgctccacttgttaaaatgacgcaagtgagtcactgaatagctcagcatcattttgtcacctctgtgggtgttctgaaaacagatcaagtcgtatcatttctgtatccaaagagagaattcaattaaattacattgttttttgaaactatcactgtttgttaaaactaagatgtaactctctgagtagtccaggagtatagagtgtttttagtagattattcagtgttgcatccattaaagaaaaatgatttgaagtaatttaagttcccagcaatgtttctcagatactttcagccacctataggaattgactaagttgtaaagttagcctccagcctttactcctccaaagccaaggtgacaaagaaagtatatagttgacttcactaatttaattttaaacctgaagcaaatgtaagaagcatataaggcgcaccctctcactgatactggctgttatcatgactttttagtctgtcattttgtgaatttgtgaaagcaaagacaattttaaaatgactagtattttagcaagtagaaaataccctagtattttaaactgttgtatctgcaattcactattatggctaacaaagctattgtgtattgatttttcaattttacaacaattacaataaaattatccgtttgatatacttgatcttaaacactcagtagattcttgctttgcttcagaatatactctattgttatcagttgtcattttactatagaagtacaaaagcagcagttagataaaaggtagaatagaccctttatcatattcacatttttactaggtttcatttatatccaaaaaacctataagaatgtttatgcatgcaccgaacaagatgaaagttaagaaacctttaaatatttatgtattctatttttattataaataggatggaatcaacagaaaaatgtgaagctgttattggtcattttaatggaaaatttattaagacaccaccaggagtttctggtatgttgtttgtctgaaacttcatcagtagtcttctatatgatgtatgtttaactttagcacatgatgactcttcaatagaacaaaaacccctcatttcactctttaagatgcattttgttggatttagaaataagacttaaaaattcacctctccctaggcataggcattggatgtttaaatgttaatggaagcagtggtaaggagctgacttgtaaagcattgtgcaattcactcctcttttgatgcagcagccagcttctgaaccaccttatcaccatcctcagtgaacctcccttcatttgatcatatccgttgagcactgtggtacctttctatcccagcagtgcctagacctcagttcctatggcctttatgtccactccactttagccactttctcccatggttttacattgtgttgtcattaccaagaacaccacacttcatgggtttttcattccaatgtcacacttactctaactcccacaaaccctgatctgaaatacaaagggatccttctcttttcactgtttattcatcctcctttacctgtttctctttcctactaagtctggtctccatttttgagtgttaaaatcatttcttaagtggcattctcctttttcttgcaccccatcccttgttcacactgtcatgacagaatgctgaacctgaattaatcctgctgtaattcacgcacaccactcctgttatatccatgcagccaaagattggcactaccacaaattaaatgtcttcagcttaatcaattgctcagcaccaccagtcctcactcagcttccttacccttccctagcagcagttctcaatttccccagcctgctcagtcccctacctaaccccctccctaatctcaagtggatgacttcacttcctacttgatgaataaaattgaaatcaccagctagaagctccgtcagcttcctgctctctcccagcaaggggacctacacccacatccagtcttatcagtcccctttcttaaagtctcatgtacaagggtttcgaagctgtccttgaggtgccgtctcattgagacattgctctgccagtcattgccttgctctcctataatttcagtctctgtcttttgcttttgttcattttttttttcagcaaagccgagaaatttgattttcagttactaaaatagatatctagcaagactaattggtgacgaaatggggggaaacgtgcaaacaagtaacactaggaacaaaacttgtgaacataactacaatagacattttttaaatcacaggattcagtgaacaaaaactatgaattacttcatgccaaaaatattcaagaagatagccatttgtgtttgaaatcatttaagtctttacaatctagaaactaaactaagcactctggttccttacagcaccttctcatgtcaacatttaaaagtgtagtcttcacttccttacttcccatttatgcatcactctctccaatctgacattccctggtgtgtggttgaaattcctcttggtaaatgcgcaatattagttagctagacagccataacaaagtaccacaagctgagtggcttaaacaatagaaatttagtgtctcagggttctggaggccagaagtccaagatcaagatgtcagcagggttggttccttctacccagacacccaagccaggctatgagggatctgtttcaggcttctctccttggcttgtagatggctgtcttctccccgaatctcctcacagcaccttccctctttgtgtatctgtctctgtgcccagatttccctttcttaggaagaccgcagccatattggatgaaggcctaccccctcgccatgatcttactttaactttgatgaccttgtctctaagtaagatcacattctgagggctgggtgttaggaccccacacagttcaacctgtaactcttaattcctgattaccccatctggagaatttcccctctttttatcctgtgtctgtctgctgtatgtatttgggactgctggcccctcactcatccatgaagtgcgtcctcccttgactacttttgcacctgtctccgttttcttcccatcttgtgttaatcctttctcttttgtaaacttatttcttctatctgcttttaattgttagtgttgccttgaattccattttttggctcaggattctgataatttcatctactctcaaggttttaactactacttatattcatagtcattgactctcattcatctctcatcctggctgttccccagagtttcagactgcctgacctcagttaccttatattcatcctctccagaactacactagtcccccttacctcacttcccatctaattctgctcttcctcctgttttcctgctctcagttagtggaaccagtatctacccagactcccaagctagaaacccaggactggactcccctacctcccctgtgctttgtatctcacatacaaataatcattcaagtccccaaatttttctttctgattatttctagaatctaccttctccctccctttcttctgccactgcctagtttaatttctgatcatctctcatctgcaccattgcatcagccctatttcttcttacctctctaaggtattctccctgactgtagccagagagacttagataaaatatatacctatgtgtcactttattgttaaaaatcgaccccctctcagttagaaggaaagattgaggattcctggaatggcatggaaagccaaaggtgacaggagcccttgcctacttctgcagtcctgtctccctccatcctctgccttcctgcttatcctcctccaacattgaactacaaatggtattcccaacacagcgtgctgcatcatttttcttggctttctctcatggtttccaatgacccagatccctttggttccctttagcctggctgtctcttcctcagctttcaagactgtgttcagggcttgccttctccctgcaaggacctcctctgacccagttgggttatgctgtgtctgcagatcatcaccttgaggacacctccgtgtgtgctgtggcacttaacatgtttacatgtgtcagtcccactaaactagaagctccttgaaagtagaaactgtatcttcagctttttattttcatgcccaccacaacttttgagccatactatgcaacaacaaatatttggtggttttgaataaattttactacactgtaacaccaggccaataccatgttcttaacaagctaccatgtggggggaaattgaaatgtcttctgatctgatttgcagccagccactagcatgccacctgccagaaaggagaaagtttcaaaatttagaaaccacatcaccttgctttgagggggaggtaatgaaattgttaaaatggggaaaaagaaaaaaagccacatacaccctcctccatctttctcccctgtaattttagtcatcttatgtttagctggcataatgcatctgtaattctacttcccaatctgtatcccagatcagcaagtcttctttgagccttaggtccatgtcagctaaaagtcctactttccagcttctgcccaagcatgcccaagggttaaagttgaggtttcacttagtgttgggtacaggtctggagagggagcctttaactgctaccctggccacctgtttgttggagtgtcaagtgggttcaccatatcaagaagatttatcccaaatactcaggctgggagagcagacactggtgctcatatctgaatgggggaggagtctctaaagtgagcaactgccacagaatccacaagaattagaacagagtgccccatttgccaaaacacagatttttgccactttttctatgcaaaaatatgtacacactgaagttaatagattcagtgaattgaaccttattaaataacataaaaaaacaggtcaggcccaatcttgaaagcaagcacagaggcaatatagaatatttatcccagtttttcacatgagacacagccaagaaacattgaggtgttttgaagttagattcattccagccagaagtcatggaagagagcagtttctccaaggctgtgcacgtataactagtgtttagtatttattccgccgtagctccactgttttatctttagctagatgactgatgtttaccattagaaattcactttaattttctgtattcagttgcttttcatttcatagagaaactaatttgtatgtgcagttccacaggctacacctgatcttgtaatactaaaacctgagagcacactgcatctgtgactgtatctgaagttgaactgcttacatacacaaatttggagcataaaatataaaacctggaagtaattatttcaagaaactcaatctagtggaagagattcctttttttgttttttaagttagtattgttttcccatcaacatcagtagagttgaaaaaaaatggaaagagaaaataatgtttttaacttctgcccaagtaaagacaaaggagaaattttgtacgtgggagtcttctgtaaaccctaccctgtcagcctccggcattgagcacctgtgcccagctggcgttttcttgctcctacggtgtcagcctttgcacgagcagggccccacacattagtccctttgaagggactattccacctacttgtgaccacctattcatccacctacttgtgacctctttgcttttttaactcattcttgtgtgcaacaaggaaagtttgagaaggaaaaacatctaggacacttttgttttgatggtgtatcagtctaagataagatcttccctgttgaaggaatggtttgctaaattaataacaacaaaagctcttcagttccttgaatacagtagatctcagggtgtcacagatcaaggttagacagtctctttttttctctaaagaacttcgtggttttgtcattggtgttttctttgaagggggtttgcagactattggtcacatccattcaagggaaataaaagccctagatttccaaaccacatgtaaatgatcgtaggatcctcttcaccttcacagctagtaaagagtaatttcttccaagctgtgccaagttacaaatggagcacaagaaacagattagttccttttacattgagagcgttactgcaggggtacagtttttcagtcaagctgttcactttgttctgaattagcacttaattttgtgccattttgaatgtgtaatgatcttttgagtgtgtaagtcttggttgacaattagattgcatgttctttgggggcaggagctatgttttctttttaattttgtgctagactcagggaacttgtgcatcaccctaccaccagaagttaccaacaggtttctaagagcatttttcatgcagagctcttcccaagaattattgctaatttgagggcctttttggataccacctttttgcacaggaggttaaattgcctttaggcatgaatgttaaatgtataatgccagacttggaagcacactggcacagtgaattcagctttttccaaaacaagtccccagtagacttgaaaacccacaaagaatgtgaaagagttttcaacttctctagacttcttttttcttttttttttttttcttgtatacatggtgacttcagaattcttttgagtaccagtttgtgtattagatactgttctttctttatatcccctgaatggttactccatagcatcagtttctctgtggagggcatatgattattatcagaagaaccagataaaaaacaaaaatattgtcaggcaggggtcagttgaatgagcctccacttgaatgtttgcataatgtagtctcattgataggtagacataacatttcataaatacagtcagaagacggtttatttaatgatgcaagttgtttagctggcgtaagcagaattatctgggatgattcctgtcagaatacttggattcttgcatggctggcagtttgcccatgacattggagccaagtacagaaaagaaacccacgttagacacaattcccgaaagatactttctcaaaatgaacaaactgaacaatgaactcatcctagctgtgacactcttaaggaagtctctagatgactaagcaggaggaagtcagctatgcacatgagctgtcacttctacactgcctgccctcctgccaccatattctttccatacccgagtggcatggctgggtccctcatgccagccatgttccactctggcctggggcatggcacataataaagcacatggttacagttttgtaaaaatctaatgtaccacatcacaatttctagtgccgtctgctttctgaaatgctcttttaaaatcttgtgcttttgtgtctgatgtcactatattttaaaagaggctttatcttttcttatagcagatgtttctttaaatgtatattatagtttgttgggggaaaaaataattgcttatgtggcctttccttctgtctttccccacccagtcctgcattttttcctgaaatattggaggtggcttgtttgtattaagtcagatttacatggaatgtccccaaccagggtaaaagaacccatggcttcttcatgacacagctaggtgaattccatcgagtttttccacaaccacttaatacttgcttgataaaaattccattatgcagaaatagtatggtggcagttttctacacaatgaatgttagaaacagagatgggaagttttagttatctagaaccagtgtccaaattaggagacatgcctcaggcaaaaacactgaaacacatgatcatgattcagtgatttgtctaaaaatgctcttctaggaccttcctggaagagagtacagtctttgagaagactaatgcgtatggcatgtgagctggaactatcctagagctgagaacagctctggcgccctgactccctgcacaaacacctctccccctcgccaccaccaccacctctcaaagacaaaggctaactgtgtgttcagtgctgcaggagacagtatgatttcccatctcgctttctgaacctctccatgacattaatggagtgtgaataagtccctgtgtgctaagggcagggaatgcctgttagattctcagtgttgcactgttatcattctgccacatcgctcacagcttcatcttgtcacagaggagcctcaatgaagtgcatatgtgtctgctggcagactcccttcaaaggcttcagcttgttttacatctgctttctgtgttactctgacttttccaattggttatgtgtccagtggggcttgaaaaccgctcttgcccacatttcataactctgtgtgtatagtgatattatgagggcattgtcctatgccaggtagcagaaaagataatgtttagagggaaaattatgaatctagtaaaaggcctggagatttttcaaaggtttttattgcccattttgttcccttaatatttctcttaagcattgttaccctgtaaaaacagaaaattttggtagctctaggacaaaagaaatacttgaagacatgtggaatgtccctggtaccttcaggatgtgcagtcatatctccctcacccggtacataaaacagaactggatctgaactcacacagcatcatgagctgtacctttcaagggctatactcttaagaagaattgttgtcgtgacagcaaaagcgctggaacaggcctaggtggccagtggggcaagggcggtcttgcagatccagaattcaaattcattcctactgaggaggagaagactagtttttaaaaagtgacaggggcccacaacctgagatgtgccagtgttctagtccccacaccaggcttatggtgaggctgccttacaacaattatcaccatcgatcacacccagcctacagccagcctcacaaatcaacattttacaccctttcacgatcaggttctgccagtgaggagtaaatagtggagtaagattttattaaagcacaaggctcttgggtagaagttgtaggtgttattgtgtaacagttttctaaaagacattgaccagtaactttatccttaactataacttcaacatttcttcattctgtaagaagccaaggcagcaactctagccagctccttaaatctctcagattcaaatcccatggataacaggccagtccccaagtgtttagaccttctgaaccagaagtgtccctctcctgagaatttttcttcatttgaaaacaagaggaggagccataattcaaaagtttgagctccccctgttgccacagtagttaagaacactagctcttctaagcacttattatgttaactataacaatcttttgaagtaggcactattatcatccccatttcagagattatgagaccagagacattgaataactttcccggagtcactagctagtaaatacaaaagcagaattttaaacccttggagactaattatgagccagttagaatactggttagaataccaccatacagtacacccaccactatagcagttggcactggaattaaaaaagattaagatccacacacagatgttcctgcggtgttagttacaataataaactatgcaaataaaatactatgtcaccattaaacaaggtagagaaggacccacaacataaatggtagaagaaaaggacctatcattgcaaatgtgaaaaataaatggctctacatagacttagaaaagtagtaaatatagaaaattaaaagatgtttgttggagtcatgggaggtatggagtttttgttttgtatttaacatgactttaatattgtcaaatcattgttttactgataaacaactcttagttgatgggttgggaagtgaggtgaaggagaatttcaataagaagaaaactcaaacccagcaggagcaaagcatgactatatataatcaggtaacatgattgtaacatgacgatattacaaatgttactctcttctcaaactgggttggagatagaaacactacctaaggcacaggggaggaggagaaacctaaacagcctcgggaggaagaacgtccacagagaaaagctgtagctcttcctagtggttgaataggtcaacagaattcagttagaaaaggagagggctaaaacaggaaacgatgttgtgcccataaaaaatagataatatttattggatccttattgaaatgttttaaaagcagcagctagttccttgcattttgtgagttgaggagtgttgaaagtagccaacattatcagaaagaaagctaattacagttgctgagtggactagttttccacagtggatagggaagcttctatcaagggcagtttacattttacagtgttttgattaggataaaatacagcataactagaaagatggaagtttggaagtgacagtttctccacctgttaactgctgtcagcatctgacagggaaaagcacggagaagaccttcgttagaacctgctgaggaaaagatcagttctgttacaaactctagagagctccaagtccttccaagctgtttgataagtgaggaggacttgcagatctcatcatgagctacagtgcttactcagagcaggcattctagaagtgattttttagtacaaatatcaaagaaagacattggagcacaaatcactgtagagttaagtttcagaagatcggtaaggaaaatactcggtggagatgggcagcaagtcagcctgagccttatccatggagctcacagtctcaggaaggattgtcagtaccacaaaatcaagcttgtgtaagagaccatcccactctcaaagctctgttgagagcacactggagaatccagtgacatgattaccttagatggctcttaagagatgccggaaaatattagatcagtgtttgcattgcagtgttgcctggggcctttaacaaatgctcaaggtaacactgcagttgtcaagctgttggagatgcatgttcctgttggttctgatgaacaggaaaataactctttagttttgggtgatgagaatgagaatccctttacaaacccaaaagatcacaactaattaaggggaaatttaacctagaatgctctgcatatttggcaaaatcagttgatttaagggtaggttatatcatttttatagtactttaacacaggaatacatcttaaatcacaaatcatttgtcagaattatttgtaatcactgctttgcagaataaggtaaaaagttgctaatctggaaaagtaaccatgcatatagaagattgacagttacatattaatttttatattaatttggccaaacttacatatcactcaaagtcatatgactagtatttatggcacttccttttctgcatgtcagtcttccggtatctctcccttgtaaaaaacaattggagttcagctgaaaggtacgctctatagaacaagctactgtcacataggatctcctgattcttcaacctgtaacctgtatattcagctccaaaaggcaaactagggactaccgctggtttggtagaagccacaggagatgctggccaaatgaggatctctcattttgtaacacgctcacacacacttaaaaataagtgggtcatgacatcagtgtgttttgtttgtttttcctacccaaaaatctaacagatcatctaacccttgctcaacatcatggtaagaccacatatcaattacaataagtcaggcccttttgccaccctaaaatacctaaaaatttcttaaatcttgatgtaatttgctttcctagggcacatggacaatctttgtaatgaataaaacattaagaacttatagggagaagctgtttctaataatgtccttcaaataaatggaacagcaattgtcaaagaaatacagctgtttctgcatcaaaagtattttgcttctggttagcatttttattgaaaacaaatacctctaaaaacaatgctctgttccataaatgactaaatgggttttcatgagattaggtacactcttttctccattaaactgcaagccccagggaggcaaggaccctgttttatctaccactgtatccccagctcttgtgtacttggcacatagtggacattaagttaaaattttgatggttaaatagaccaaagagaattttaaagaggaaagctgttagaattttatattgcttcacatggaatattggggtactcccatttccctgaaacaagcagccagcaactatctcagaaatgtgtcatttttactggttataattcttaaaaagcttgttttcctaagatatgaaatgcctgccagtatacaaactgttgtaactacttccctttttgcttttagcggggaaaaaatagcttaatgacagcatagaatcatgtagtaaatataattcattttttgaaaggttcagctatatcctcttccatttgtttattttaaatgatctaattgcaaacatgtcatcactcccttgatgtttacctccttgttatgcatttttagcaggctttattgtcacctgagattttttttttctttgacaggctggagtctagatgaaggaaaatgtgttagaagcaccttatccacagatggggacacttggtcattcagcacatgttgagcttaggcaggcatcagggtctggctgcttacctgcttttattcacacctgcctgtttaggtggcctgcactgaacttctagaatgagtccaacctgatcatttactgtctctgaaagaaattatgctaatagagaaaaacggccagttgggatcacttgctgagccaagtaacttctttaaaaaaaacaaaaaaaaggttaaatttcagtctaggacctagttttcataaaccctctagataaaagcacctcgttttagagaagacccactatgtaccagcaccaccaaatttattatcttctctcttgctctacgagattatgtggagtcaacatcttacaacctcaaatgtcagtggataaacctctctagatctgggccaaggcttgctgatagtctcaccagacacctaacatttttgttcctgactcgtcatacccatagtccagttgtcattcagaagtgagttggcattccaacccatccctccagagtggttcacaccagggaaagaagaaaggagtgccaggcagcagcccagacagctcacccagaaggagttacagttgggctttttgttttcttttgttttgttttttggcagagaagtgttgaaagacactactgcttccaccctgtcattagtgggtgggtaatcatgaaataaaataagagatgaattaggataataagaggcacaggagaaaggagtaaattttccacaagtaatatttttctcttcgtggttatttaactttgaaacagaacttgaaagtagtaatcatggttctacagtagacaaaggacagaatgtgggaaccagacaggaaggtgtgattgcctttattacattaactagaaacacagaaaaatgcacaactttctggaatacactgctatttccattgcagaaaagcaaagaaaaggaaaagttactggtgccctattgtgctgtctgtagacttttttttttttttaactctaatgagtatatatctttgaaaatattctctacatcttctgcttttctgttttggcctcatggattctgtaagaagaatttatataaatgtataggtatatagtaatatatattataagtaatatagtaataatatacagatctatatatagtggtatatagatatatagtaaagcaatacccagttgtatgattaaaggcacagaaaaacctttaaatagggtggacaagtatttttagctttctcacaacagccatcttcactgacgtatcccaaaaataaacatatgagacctatttctattcattcactgatgcaaccaagatgtaataagcaactacaaagtccagacacttaggcactggggatacagtgatagacaaaacagacaatgttactgcccccatggggcgtatagcctagaaggggaaacagacaccaagcaagtaaacatactcaccaattgttacaaattgtgaataaaaatatatgtgcgagcagtgtagaggtggcttgttttctactgggagaagtgaagggtccctcttaggaattataatgggacgctaagggaccattttaagttgggggaggggaggatggcacaatcctattgaatttgaagattattttggtgacggtccagaggtggaattggagagggcccaaaaccaaaagaaatgtgtctactcttaagtgtgaaagtgaatcgaaagattcctttgcttcctcagaatagttatttaaatgttcagaaataataactagtatgtttttctgcactatgtttttcatcgtggacagttttacaaaggtctgagtaaactgcttttgccttaaagtgttgtatgaattttctaatagcgtgaacactattcctatttttgtaatacattttgtcatccacatacacgtatcattgtggtttcattttatttttctctgtttacttagcccccacagaacctttattgtgtaagtttgctgatggaggacagaaaaagagacagaacccaaacaaatacatccctaatggaagaccatggcatagagaaggagaggtgagacttgtaagtcctttcttgaaactttgcggggtgggggagggggtgtgatcttgaatgcccacatgaaaagtaacacaaaaaggcatcttgacttggctgcacacttctgaaataggtgccaggattaaatcttcctttcggtacattataattcaagtgatgccaaattaaaattcttttcattatatatggtgataacagagtgattctccagatggaccgataggtggtggaagcagctgtgtttaccagctagctacacatgaagtaaaagagcattctaaattgccataagaaaaacacaagtgatttgggtttgtttttggtttttttcagaaacagggtttctgtaggctaggcgcggtggctcacacctataatcctagcactttgggaggccaaggcaggcagatcacctgagatcaggagttagagatcagcctggccaacatggcgaaaccccgtctctactaaaaatacaaaaattagccctgcgtggtggtccatgcctgtaatcccagctacctgggaggctgaggcaggagaatcgctgcagcccgggaggcagaggctgcagtgttccaagatcatgccactgcactccagcctgggcaacagagcgagactccatctcaaaaaaaaaaaacaaaataaaaaaaaaaaaaaaagaaaggaagaaacatggtctctgttgcccaggctggagtccagtggtgtggttatagcctaccacaaccttgaactcctgtgctcaagcagtcctcccacctcagcctcctatgtagctgagacgacagggacatgccaccactcctggctaatttttaaaaatttttatttttttatttattttttatttttgagatggagtcttgctctgtcgctcaggctggagggcagtggcacgatctccgctcactgcaagctctgcctcctgggttcatgccattctcctgcctcagcctcccaagtagctgggactacaggcacccaccaccatgcgcggctaattttttgtatttttactagagatggggtttcaccgtgttagtcgggatggtctcaatctcctggcctcatgatccacccacctcagcctcccaaagtgctgggattacaggcgtgaaccatcgtgctcggcctaattttttaaaatttttatagagataggatctaactatgttgcccaggctagcatggtttcttagaggggtttatatttataatatttagaagttatcctaaatagtaatctaaatatttatatataaatagtacatttatcactgagttggggtttttttcacctctcttttgaatagttttttttttaattaaaactctcaatttcgtaataaaatgttggacgtccatttccctgtattgactttccatgaattattattttaaaaacaataacatattgatccaagaatgtctagggaaaatgttctagaatctgcactgtccaataacagccaccagccacaggtggctctctgagcacttgaaacgtagctagtatgctagagagattgattttttatgtagttttaaatagctgcatgtggcttatgactatcacatgggacagtgcaggtccagagattaattttcatatttatagtcattttgactaacagaaactcccaattttatcaaatgctactagactctaagtacaaattcccctccctcccctttttttttaagagacaggggtctccttctgttgcccaggctggagtgcagtgatgtaatcatagctaactacagcctcgaactcctgggcttcaaaaggatcttcccacctcagcctccccagcagctgggactacaggtgcacaccaccacacctggctaaaaatagaatttttaaatcatgcctttctagatgaatgtttatatttctttctctttcccataggctggaatgacacttacttacgacccaactacagctgctatacagaacgggtatgtcgttaaaataaatccataatggcttgagggaaaatgtgaaggtggaaaatatcagacatttgttccatgaattattctatttaaaggattacttaataaaggcttttgtgtttgttctagattttatccttcaccatacagtattgctacaaaccgaatgatcactcaaacttctattacaccctatattgcatctcctgtatctgcctaccaggtttgtacctttaggattcgtcagcagtataaccacttgcggaccatgaatctctgctacatttttatgtgtcttaaaattttgagcgtttatgaaatttgagtcaaatattatgcagcttggatacccaatttagtatgagctgctttgtatttggcagagcaatttatgtataggagaatgtaaagcaaaggaaaatgtttgtcagtggtcagtccttggaatcatagcattttggattggaatgaacccaaacacttccttcaccaaggggccctgcttttggacaccatgtgtcccaaaaattgaaacttaagataattgccgttagatataatacagaataggtgtgtacccttgcttttgtttattcttcagcaggaactgataaaagaacaagtataaacatggtaatacataaagatgtgtctctagtaggtagcattaagtgagcaatgcagctgacatttgaggtaaaaatataaaagcaaaaaggtgacttcctgtttaggttaagtgaggaggctttaccttaaaataaattcccaacttagcaacaaaaactcttgaaatgtcttgtatttcaagatttgatttgattttaatgcaaaggtagctcctgtccgccatgaacccagtagtgtacatgcatttctcctcctgtgtcagaaaacctctaacaggattacttcctggacccagataggaaccttataatggagttcagttgcagacatgtgggagcagagttcccttttgttgaccatcaggatcctgtgtgactaaatttttgtgtattcttgattttaaaacaattgaattagatgttgtagtcctaatttctggggttagaggactacaatatgtaatctaatagttgtgttattttaacttctataagcctcagtttcctcatctttaaaatggggataataatagtttctatctcataggcttgagagaattatgaaaaccaaatgagactgtataaagagcccagccaaggacctcacatatcattatcactcagttaatgttagctatgattattatcattaatatgcatgattaggtggctgataataagagtatattagttatacgtttaaataatgaattggccaacataagcaatgtcatataactaattctgcctaaaaacataaaaatggttttgaataacagaagtgattagatacgctaaaactgaggattggcattatcattcacagtctcctatgcttctaggctcttacagcctcctttccctgagttgtcactcgttttcttttcttttttctctctgggttcttatgttacttattctggtgcttcattctgctgggcgtagtattgactaatttaatgcctctttagttgttttggatttaggattcctatcctttctttgactgtataagactcagtgagatctgctctagtgcacttccctaattaacaattcatgtgtctgctatgaaaaggtagtctttcttaactgtctgaacttggaaacctctgtcatttatatgtcactgaaaataggggcaagtgtaagttattctcaggcaaatgaaaggttgtaagtattaatttgaatttatgttgctatagatattacagctattaacacatttctccaacacctctttttccctcttataatataaaaccagtgtgcatttggccacagaaccattttgtacaataaaaattaggagatctgtgtcagtaatagatttgatatagctaactagaaataacatattatttcagaggccttatttcctctcctgggcattctgtatttctctaagatacatatggaatttcattgcattgcctgacactcggtgccatagcctcaaagactgatttttaactacataagttcagggacctagtagggtcagtggatgagctttaagtgatctgtgactccttaagttgtttgcaaaatgttgcttgtgtgtgtgcaattaagtggggaaaaatgttctatttccctaattaggttttcagagggctccatgaccctaaagaggttaagaaccaatagtaaagagtttacaaaacattattattcccattttataattagaaaattgaggaatagaaattgacagcagctgatttgctgcttaagaaagaaaattagatgtcatagttccctaatcctgtaatgctataagctattagattattaagaccactgaagcatataaaaaatgggggcatctggcccaaattagggtctgtagggagttgtttgccttcccatcatatatccagtgagggccctgcactcatgttggagtgggcctttctccactaaaccaccataagcttatgcaattggatttgagaaattggcagctgcaagaaaccaccaaccccaatggggaaaggctacagtccagataactgaaatgttaacaaggcagaagcacttaactttggtctgccttaggtggcaaaggaaaccagagaaaacaagtatcggggctctgctatcaaggtaaatcgcaatacattcttcccccatgactcttccccatatcctctctgttgaacctctgaagttaacaataggggataaaatgcaggagggttttgttgttaagaattggaaactgaaacttaataaaattacttagactctggaaagctctgggcatcaagaaatgggctgatatgtttttctcttgagtggcagactacacatgctttctttcctgccacaaaacctgactctcacatctatttctcaattcagagggtctactgtgtggatgcccatttgactgtagatgtcaaaatctagttactgaagtttaatttccttaatctgaatttcagatttttattttctgcactaagtagaaattgttgaccacaatacaagatttctaaaattaatgtcctagatatgaaagagaaattgaatttggttttttgtattaaataagcacatactttaagggttagcttctaataagatgtgctggaattaatcgtcattcatctgtaattctaaagcacctagttcataccttgattgttaacacttttcactatttgagttgttgctgtgtttatctcccttgcatagatagtaaatttcttgagggtggggcccagtctgtttcgcctttttctctttgttgcctgatactcaacaattacttcttgagtgggcaaatagaaattgtttctaaataatcatttcatcctgttcagagtgaccagtttgccaagaattctaactgccttaatctttttaatcattgatagtattgtttccttgttttctttctgtagatttttaacatgattaaaaagagttctaaagaaataggtaagctttacaatgaaaatcaatatttctttcaaaatcctcccttttctaggtgcaaagtccttcgtggatgcaacctcaaccatatattctacagcaccctgtaagttttttatcttaatgactttgtgttttacaagtaagttatgtgtatattctctctaggttaaaaccatttgccaagggtggtataggatttgggaaattttaaacatggaatatgagaatgtacaatttcattataaaacttcttctcatccttataaaacaacttggtagaagatattaagttacattttctataagaacttaaaatatatcatatttgaggcagggcaccattttcttattcataccagctctttagagatcattcaaatgagaggctacatttttaatagtacttgggataaaaccgctctcattttttacattctgtttaatgcagatataaagttcaaaaccgagatgaagattttcatcagtgttacttggcctttctatggagattataaatactaaagtggtagcacattatttggtaaataacaaatgtgatttcttaatgacgtgagcattcatatatattacatttttttaaattgaatgagttatacttattatatagtgtatttcatgtgtttttcaaagacacataagatctagtttgtggaagaagggtttgaaaatttaaaaatacatatggagaacaaagttacaataaggctaaggatgtccaacacaatgaccctgcatgctcacatgagaaaatcacaaatttggctctaagctttctagtaactgatgcaaaatgggaatcctggtaagcaatacagttcacaatatgtgtaaaataaaaacagatttggttgcttagaaaaagaactgtattcttggccttatgttcagacagcaatttgtcttcggataccttttaaagtggatactgcgatgtaagaccatgtatatgaaatagcaatccagggataacaggttctgaatgagaaattgctgagatgacctttaagaagcagataaaacatgtttaggtgatgaaataggagaggcgcgctctgatatatgtatacgttttgtgtgatatatacacatacatatagatctatacatgtgcacatacatagacacatcttcaaacccacacttacctgtacatgtgtacataatatacatgcactgatccacacatgcccatagcaatctgtgtccctgatactccatgctaccctattttggaatgcttggaaatcagcttgctttgaatttgaggacttcctattacagatggtgccaatgaatgagaaaaaggagcaggaaactgctccaccatcttctaggcttctgagtcatttccgtgttaccacttgctttttgatgatgcatgttaaaaaaaaaatttctaacagaatgtattaatgacaaacattatctctgacacacatctatatctttttttctttttggcaacatttgagaaaaagactgcacgtatctgagcttaacatctttgaggagacattaggaatgtaagcagaaggttgctatctgaggattcattacctttccccacccagctttaaactgcctgatttacatcagaattaaagttcctgtacacctaactctgtcctagattgtctatctaattatcaataaataacagttgtatttaagggatgccaggtacagtgataacaaaacatacattagtagttacagagcgtgtcagaatacttgcattctcagataatgaggtgattgcaaaagtccaaaaataaagagttcattgaattttggtttatacaatcaatgtaaccatttaaaaaaatgatgataatgatagtttttcaacaagctaggtaaatggttagaatagaatgcaaagttaagagcaaaatcccaggatatgaagttgttgatgtgctctgattgaacctgtacagaaacacacagaggctatgatctggcagtagtaccctgacattgctaacagtggttgtattagactggctgagttagaagcaattgttttttttttccctcctattttcctaaatatatttaatttgattttaatgactaacattttttcaaattaaataaaagaatctggactcagattattaatcatatctgaattgccttccctcccaggcaccaaaatgtaacttaaagttctgagaaacactgagtgaatgaagaaatgtgctcttgatcctaacaacctgatcttgaaccagacgattatctggatagaacattgttaaacaaaatactatattgatcttattaaatataatacattgtttggtgactggagaaaacatcaactgccttttttttccagatttttttttaagaaagcgttttgtaaccctaggcaggcagtgataatcagtttgtttttcctatgatagctcctcctgctggactagcttgcttccagttactggaagtgaagggaaagggaaggagaagagggacactggctttaatacagggattgttgtgaagtgaatgccaagatatcatttcccctaacgctcttaaaaaactctcaggaagagcaatttagaagatttttaggaaactgtttatgatgccatttgcaagattgaggaaggttgtttttgcttcacattcttaaacaaactaaggtatttcctttgtaaaaagtaattacaggatcttaactcttgcctcagtttgtctaattttgctcctgtctccaactccccagggtgccgtgttaactccctcaatggagcacaccatgtcactacagcccgcatcaatgatcagccctctggcccagcagatgagtcatctgtcactaggcagcaccggaacagtaggtggcaaataattatcatgtgtctctgtaaacagaggagggtaaattaatgcagcctgtatcttccctatcaaatgacagcctctatgataacagattatgtctaatcccctctcttccccccacatgaccttccataaagtaaatactcagctatttcttaattaattgatgaactgaaagtctattctctgggtatctctcctttacgagaatatagcacccacacgtgaccacatctagccttttatgactagtgtcatctatataactagtaccactgtccctgtggcagtgtcatgaagcgaaagacgaaggtaatacaagatggtaaaagcagggaattatttctcgcttatttcttcttttatggagtttgggagtattgaatcatggtcttaatattgaaatatttcaccaaagtccaggggactcctttgggtaatgaggttgagctggcaccagatcagcttccagatttgatgcttagcattttgctggtaagatggctaaaggattttaatttagcctctattctatagtggcttaaaagaacaaagggtggtgcgttttccccttatacactcaaaacctacagctgtttcttgtgaaggctaagccagggccacacatatccaatgagactgactagaaatttctcctgcctttgggaaaggatgactgtcagtgtcagaaaagccaggctctgctgcctaatctgcagtgacctgttagaggtctaataagtcttacccctgtgggctctacctgtagaaacaatactaggtactagtttagggggctgctagaaaataatgaggtcctttgaggagagatcttctaaaatcacacattagtgatactgaattattgagagtgacaaacttttttatcttcacccataataaactttttttatcttcactttgttagcaaatccaaagaaatgtggaatttttagtttagcagattcaaaaagtagaaaacagtttaccttccatatgacatatttatatgcactatttaagctttgaggtgtagcccatttaaatttcttctttgagatttccaaatacattatatccatctcacaatccccccacgtactccaaattttgcatggtttaccattgcccattctgacctcattcttctttctagtacatgcctgcaacgtcagctatgcaaggagcctacttgccacagtatgcacatatgcagacgacagcggttcctgttgaggttggtagagaccatccagtgaccattctggctataagtagtttcagaaatgggtaaattaaatagaactcagaaaaatctaccagacgtcaaatatttgcataaagaattgcgtttagccagatgtggtgggtcatgcctgtaagtccaacactttggaaggctgaggagggaggattgcttatggtcaggagttagagaccagcctgggcaacatagtgagatcccatctctacaaaaaataaaattgtttgaaaattggccagacatggtgacatggacctgtagtcccagctactcaggagtatgaggcaggaagaacccttgagccctggagtttgcaactacagtgagctatgatcatgacaaattagggtaacaacatccaggccacacctcttaagactcccagaaatattttctaagcctatagtgcctttcatacccctcggacgttctgtcttgtctctcataaaatgatactacagacataataagataaatctggagtttgcagtcccagtactaaagatcgtatcaatgataattaataatgacgaaaagaaatcagttgtagttaagatacttagtggaaaagagaaagctgttttgaaactgctacagggatgaagaagaagctatagctgtttttacagaggctgttagtatggctagataactgttcttgttatggaagatactgatatgaaagaaagaagtctagcatttgaattatggttagagagaaaacgtggcattttcctgcaaagtatccttaaaatttcaaggaaatgtatcaatccagttgatcttgcccactaggcagatcccaaaggttccaattccaggaaaggatcataggactctggcctgttggtggaggtggtggtggtggtggtgatagtagtagcagtagtagtagtagtaggtgttggtggtggtggtggtggtggtggtggtggtagtagtattttacttctgtttgtgcaattactgacaaccacagttaccagagcctacaattccttacctgcaatctgaaacccaaaaagaaatctgaaaataaaaattatctttgtaactactttagcataaaacctgacctatggcaaaactcaacctgaattgagatgagacaaaatcttgatcccacttaactgtgctgcttcatggcttccagtgtagaactattaatatgtttgcttatgaggtgcagccctagaccctactggaggcattaaatgatatacagcatatgcataccacatttcagattataaaatctgaaaatactgaattccaaatcacatctgtccccaggggataagagggtaagagatttgtttgatatgctgtagcttgataagaataggaaagtcataaacatttggatgggaggtgctttgggtctgttagacatgccagctgcttagggaaatgattaaccttgaaagctctacatgacgtgaagaaatttactttaaagagtaactgtttttaaggcactgttggattcagtcaggcctaagtagcagagctgaggttttttcactaacatgtctcatccattctgctttgtttgttgtaggaggcaagtggtcaacagcaggtggctgtcgagacgtctaatgaccattctccatatacctttcaacctaataagtaactgtgaggtatgagggaaaggtcttcataactggggggctcaaatcaagcacaatctatagggctttttttaaaatcagaatggtgattgggataactcggattttatcatactgctttaatcgtggccaaggcatctagtcttgttgaaatattaaaatcagtgattttatgaatttaagattaatcattttgtctaaagagaatgctttatactgaagccaaatgtatactctccccactaaaaagaaaaaaataaaaatctgtaacatcagagaacaccaagaaccaaaattgttctataatacaagtatcctatatcatattactttaatactcagaaactggaggacctatagcataagatgttgctcaatctagcattacaagtttagcaacatcttgattatgaatttagataaatgtcaatatccttagattgaaagattatattcccaactctcacttgaaccacaaatttcaaaacttttcactttaccatgcagactgtaataaaatagctgtgtagaacttagaataccctggtttctgcattgccctggtgatatagaataccttggtttctggattgccctggtgataacatgtatttttgatttcataaagtcactctttagagacccaaatgaatttggctctaaattagaaaagaaagtattttgcaagtcctggatgtgacaggcattgaaagtaaccatcagttccagagtctgcatttatcagtctaccatcagtgatgagcataacctttttcaaacacatatctctttaaaacaagaaacagattacaaagctctgtagtgtttcacaccaaatctacaaaagcatttgtcttttatttttctcttccagatgtacagaaaggtgttcttacatgaagaagggtgtgaaggctgaacaatcatggatttttctgatcaattgtgctttaggaaattattgacagttttgcacaggttcttgaaaacgttatttataatgaaatcaactaaaactatttttgctataagttctataaggtgcataaaacccttaaattcatctagtagctgttcccccgaacaggtttattttagtaaaaaaaaaaaaacaaaaaacaaaaacaaaagatttttatcaaatgttatgatgcaaaaaaagaaaaagaaaaaaaaaaagaaaagaaaacttcaattttctgggtatgcacaaagaccatgaagacttatccaagtgcatgaccggatttttgtggttttgttcattttgtgtttaatttgtgttttttttttccagctgtatgaaatgggctttctgaagtttaaatagtccgacttcacccatggtgttctgtgcttgcagtgcgagtgttgctgtaattcagtgttgccgtcagtgtctcttttcttagctttctgtctttctttcaacgtagtgtgaagtgtcttatccttttctatgaattccaatttgccttaactcttttgatgctgtagctgtttcagtaaaagttagttcaaactaatgatgtagaatgctttgaccaaatgagctggtctattatgccttgtaaaacagcagcatagggcttttaaaaggtagtcaataaaagttgctgaaattttggcttttttaaatatgtagtaggtgtttttaatgatttttcacataatgtgtaaggtagtgaaatgcaagaagggaaaaatgttttgtgtgaaacacattttctgactggggaacttttattagggtaaattgtttgtaaggctgtacgccaacagtttcctctgatagtttgactgatttaggatatctgctgtatgatgcaatgtaaagtcttttttgccttttttcaggaaaaaaaaaaagctaacttgatgtactagatttagtgtaggtagtgttggggttggggatgggggtgggggaggggagtcactgaatgttttgtccttcctttatactaatgatagtgctttagaatgagaattatgcctgaaatctggcaaaccgaaaaatgttgctattgcaacaaagtggcaaaagctaaaagtaaggatttatcttcaaacataagctgagataacgaatagaagcaaaacgattggctactagctctctctctctctctctattaggtaaatttgaaaaataaaaatgacttggcacttttaaaggtaacttcaccaaagaccgaagagccagtaaccagtagctccaacttgtctcagcatcacatcttctgtgctctttatttttgccggaccagtttgcggttaggagaatgtgccttttttgtacctttgcatttaggttttataattttaattgatgtatggacacacacaaacaaaaaagcatgaaggaagatttggatccaagcagtgccacactttacatcatcactacaagtgttcaagtgtaaagaaaaccaattttgaaactatgaaattcctgattcataaatacacagttatttctactttagtacatataagataattcactgttattaaagctcttttattaaggcaattgcatatgttttaaaagcaatggtaaattaagttgtcttccaaaactgtgtacttgtctggtcagctgtgtatgatcagttatctacctcagagtctattttcttttgtgctgggacaggttgctggccctccctgtttccacagaccaaatcctcctagctcaggagctagggctaagcagttatttctttcaagtattttttagttcttaaattttatgcttgtatttgatgatagatgtcagtgacatttcatagtttcaaaagtccttgctgctctgagaagtgtagattctagtgaaaattacatagtcataagagaaatgtgtttttgtttttgtttttgtttcatttttttaaagttgtggtattattggttctatgctccctggaatattactgctttgtgaaagtccagactgaacgcagcaccctctgtgtacctagtacagttataaacctgggtctctcactacttgatatttttgcattagttaagacagaaatttgatagctcggttagaggggaggggaaatctgctgctagaaatgtctgaactaagtgccatactcgtctgggtaagatttgggaaacataacctctgtacataaaaaaaaaaaaatcagttaaacatcacatagtagacagccattaaattataaaaaaattaatttatgaagaaagaccttttgtacagattgaaaaaaaaagattttcatagagatatctatatgatcaagagagttaattttttatttttgttttactagtgccacagacttgccagtggtaacttatttgtccggttcaagataactctgtagttttctttcctaggacttgttgttaaacgccaaaagacatttttgaactgtacatttgatcagattgttagcttttctgttttatttcttttgagaacctttgaataaaaaacatctgaaatttta

SEQ ID NO: 140 - DNA, 76998 bp, Homo sapiens
gagcgaaggggttggaagcggagtgattccccacccctgctccatctagctctttccagtgcagccactgccgccgcccaggagccctcgtcccctgccttgtccccctactcgttcccgctcccacggcatggagcaggacactgccgcagtggcagccaccgtggcagccgcggatgcgaccgccactatcgtggtcatagaggacgagcagcccgggccgtccacctctcaggaggagggagcggccgccgcggccaccgaagccaccgcggccacggagaagggcgagaagaagaaggaggtaaataggaagggggtgtgtgtgtggtggacaaatcctgtgcctggcccctctgaggggcccaaaccctgacctttcggcgccgacaggtacccgcggagctttgcggggctaggggcggcgggtgcgggggtcggcggcggaaccgcctggcgttcgctcccctccccctttccttctcgccgcctggaggacgggggcggggctgggcgcgggcgggagcggcgcggggtggaggggtgcccgctctcccggggcctgggggctcgggagcccctcgacagcccccgaccccctccaccttcccggaactcgggtaacggggtgggggatggggctgtgcaggaaaaagcctccgcctctccctctcctctcgctcgctccctctccccccgccttcccgtcggcctctgcctgggaaatctgggcccttcaatcccacactcgcgctaaaggggttttgctggggctttttttgtaatttgaatttcaaggtgctggtggttgctgggtggagggtgacagggaagacatttctttctttcattggcaatgtcggtcttttggatggcaggaaaaaaaccatcccttgttcgtttgaaccccgcctgccgaggtgggggtgtcaccccgaggaaaggagctctctgcgtcgtacccccccgcccccccaaactgaggaaccgtggacgctggcttaggaaaatttccaacatctgcaccctcaccctcttctgccccgcccccgacggtatagggtttcactccagggccaccccaatggtccctcaatccggccccaagctttccaggcttccgcctccctctcctagtgggcgctgctggctcctggacacacacaggttttttttttttttctcctttaatttttaaaaaactcagcgtcgccaagatgagctgcttctaacgtaagggaactgctctgacacatattaaagccaatccagaaaatatgtattatctccataaggcacatttcgtgtggcccgagacatgcaaataaaactataaaacgttgaaaaattgacataaaaataggatggggcataagcatttttgatgtatgataaaattgcataactaatggtttatgtgtggattttttcctatttacgagtagtcatatcgcaattttaaaaaggtgggtaattatgctttagagatctcaagtggctttgtctgaatcattatatgatactatacgaccaaatgaaaagcttttgaggaaaatgaacacctttcgccttaaatgagaagagtaattttaaatttagcagttgcttctgtgacatattttactattacaaggttgactaaacagaaggacaattgtagtgctaaatgaaaaccgtagaaaacatacacattgtaagatctacgcggtacttggattagtaagacaatattgttggttaaaagtgggtgtaataccaagcatcaatataaatcaaatgttgtgaaattcggaaatgtctgtgtgccttttattccctggactgggcaaatgtgagtgccaaactgccttttgtatggcaggagaggttgtcgaatttccagattgtataaatttttgaattttgtataaaattttgtattgtgaaaaaacgggagaccaataaaaaagctatataatataaacactgagttgatgcctacatatttgtcaactcttgcctcattagaaattgccctaccagtacttcatttgtccacccaggacagggaaatgaggtgctgtatgtcaggaacttcctggatatccatttttatttttaatttttccttaaaaaatgaaatacattacatactaccttgacactttaaattgcatactaaaagtgcagattaacctcttcttcatggccatcagttagtgtactttgacagtgacacaaaggcacctgaaatcccgcaggttgttccctctcaattaagtaaccacctaccagactcttgcagtgttgtgttgatttttaaaaataatttttccagccgggcgcggtggctcgcgcctgtaatcctagcactttgggaggccgaggcgggtagatcacttgaggtcaggagttcgaaaccagcctggccaatatggtgaaaccccgtctctactaaaaataccaaaaaaaaaaaattagccaagtgtggtggcaggcacctgtaatcccagctacttgggaggctgaggcaggagaatcgcttgaacccggaaggctcaggttgcagtgagccgagatcccaccactgcactccaacctgagcaacagagtgagactccgtctcaaaataaataaataaataaaaattttctgtcttcttccttaattgccaggctgttagcgatcactttttaaacacctctagtttcaccagaaataatatgttagtttatgataaagattataggtgtaacaaaaccataaactcatttgaaaaccactgtaaaatacaaaagtgtcagtgataaaacagggagagggaaataatgacacgtgcacaccaagaatcagtgatgctactgcagtggaagacattttcgtccttggtttctgccgtgtcttcttgtagagtgccttcatctagtgatctttccatgtcatttactgttgcttgtattctcggtgacatgggaagccagattttcaaacttggtggaattgtctaccaaataaaaagaaaataggtttctgaatgagagcgctttcatgatgaatacagtagatgagaattagtgaattgacctgtgacatttacctactcaaaggtgtttttgcttactttctggttgttgaatttagttggtttaagtgacggttggattacccaacactgtagacatgaaaacgtcaagaaaaaggtcatggtctttaaaacaagccattttgttgaccttgtgctgcattctcatggcacctagactcagataacaaaatccaaaggaattcattagagtctcttagtcacttttcatcttttcttgtatgaaaaaaatgtagttttgagaatacacacacacacacacacacacacacacacacacgagagaaggtttagaaggtaggtattttaaaatttgttgtggaagatagtgccaattaagtaattacccacagcttttaatagccctgctcaagattaggattttaattagcatataattagattttgatggtagtctaccgcaaggtaagcaaaaaagtaatgggtaaaatgtttttctaggattaaagctttaattttctgtaagtgtacttcccacattattatatatatttgtgcgtatgaggcaaagtaattttcattgttttgatactggaaaactgcacttcatataacctttcaaggaatgaatgataaacgtatggatttgatacccaatttttcttgttgctttgaaaataaatatgatttatattatatatggcagtctgaaagtgtgagtttgaggggctctttagcagttttctattctcatccatccaggattacattcaaaacattccatatagatgtgtacgtatcagatgctgtaaatcaagatggttattatttgggttagtgtaactgaatgatatctgatcagtgctacaaagtaagagtctggacaaggtcaaattccataatctcagtttggatttcctcaaaatagaaattttagtaaatattggaagacataatgggggccatatttttcttatgtttaaggtcacattctgttgatttttgacctaagttttcataaataggttgacaaaagccatgatagttttcacgaacaaatttgtgttttctcttatgcaaagtatgtgttaaaactgaaatgctctcatctttggttctggtgggtagatttgtgtttttattattttatttcttggtttcttatagggaaggaggcttattctatatatgtatttatatttgccagtacaggcttgtctttacaaaggatagggtgcatgagataacccccttccccagataatctctatattaagttattgattgatgttagttttcgctaaattacaatttaaaaatatcaaacattaatagttaagtagccttgacaaattgcttctacaagatgtttatgcaatataaatagtttaaagtagttttcttcccagttagagaaaattaacataagccaaaagtttaaaactgtactattatattaagtatatgtgatcacattgcattacataaaaaattaaatattcttataatactatgaaaacaattttaaaaatatcgttttaggaacagaaaccacagtttttttttctgaaagtgtggcgtatttccatgacataaaggagtgtttcttagaattaatatttactttctttgaattatttggtttgtggttgatattagccttttctagattttaaaatctcttatttaatgtttacacattttcttacactataaattaaagaatggatgagaaagctcagtgtcttgccttttgggttttattccaattaatatttctttggcattcacaatttttcagattttttttattggacctcaggtgtacagaactggattaatcataagccttgttttgtgacatgctctcatcattggtccatacatgtcccacattgatttatatatttagttatgtaattactttccgccttcttctaatgagagcattgaccagtttaagaaccttgctttgcaatttggtgacatttattttctttgaaattctagaaaaacgtttcttcatttcaactcaaacttgctgctaaagcgcctaaatctgaaaaggaaatggacccagaatatgaagagaaaatggtaaatgtagtcttggataggatagtgaatgctgtaattaatttttatagttgagatgttaaagatgaaaaaatacatgtatatatataatgcatagagaatcattgattttagaattggaaaataatttaatatacaatctatcacaatattttctgttgaataaattaacctcctcattttcagatgaggaaataaaggatcagggaagctatatgtcatagttaggactagaagtcacatctcattttggttcggtgctctctgtcccataataaagtgctttaagctagaaatatttatttatgaggtgaaaatatcagtggtaataccactgtggctttgtgacctgagagaaatccagtcacaaagccagattgacgtatttttgtttctttctccttctttggacatatgaataaatgctacacattaatgaaatgtgtaatatgtcaatacactttaaagggaagaatatttgtccaatgcatgaagatatcacatatttaagcagcataatcttagttatacttacatattgcttgctataatacatttaattatttaatttttagttactaaaatacatattttagctttaattttaactaaactcttataaccttggatctttcaagaatttaacaggtggttgaaatggatttttttttcctctgaggggttgtttttgcagtaatattataaaaataagtatagatgaaatatattttttggttgttgatagctattttataagacttaatgtttaaggccacatctaatgtaggtaggcaatgttttaacaactctaaaaataacattccagtgaggataatataaaatggaaagtttttggcctccttccagcttgtagtctgaatttatctaactcttatgtttatgttaatgaactcttctgtaagttttctgggttattaattatgcatccttcattagcaatcaagtattctctactctgtggttggaaagtgactttgaataaataaatagtctttattttttcctttatctagaatgatgtatatatcttttgatcttttaagatttttttagtgaaacaaagttttattgcctgtatatggtacacgttccctgaccttttacaatttattgagaaattagaatacatatcaacttttaatagttaataaactatttcacatatatgtgcatatgtttatatatttttcccaaattctgcttactttggggagaaagtttatacgctactagcacaaaatacagttttctagatccctgtgagtgaagagaggagtgtttattacattactataccatgacactgaaaatattttgagacaagatgatactgtattttaagatttaagttatttctggatacaacttggaaattcttaagagttcagtttatggtatatatatcatagttaatttatatttcaatatttgggatatgttatatatttgatgcttaattttgttactattttatttaataaaatgatgttttggaaagaggatttgctttatgattatgactctttaagaagggtatttcttattggggaatttactgtctgtcagataatttttcttcccttcaaactatttgaaaatacattttcaaattctgctgcttattagctgtgcaaggttgggcaaattacttaccctctctgtgcttcagtatcatgtagttacaatggagatgatacttgtaattacgtcataggtttcttaagagaattgaatggattaatgtttcaagtgctaagaatgttgttcaaagtaagtatttgttaaataactttgaaggaatgaaaaggaaagtccttacttttcttttgttttgcaaattagaaagccgaccgagcaaagagatttgaatttttactgaagcagacagaactttttgcacatttcattcagccttcagcacagaaatctccaacatctccactgaacatgaaattgggacgtccccgaataaagaaagatgaaaagcagagcttaatttctgctggagagtatgttggcacctctctctctactttctttcctttctcctaccttttcttcctcctgtcctcccttgatcccttcatgcaccccttcgctcttcattgttcagtataccttcatgtgacaaaaaatattgccattataattatgttttgaagacaactatatttttttctcactagaggctgatcagtaaaaatgtaggctggttctactgatttctaagcaagaccttggacaactcattctttttctataaaagataatagccatgtacactgatttaattgataccttatcatttaggtcgaatatgaagggatttccttttttaatttcagctaccgccataggcgcacagagcaagaagaagatgaagagctactgtctgagagtcggaaaacatctaatgtgtgtattagatttgaggtgtcaccttcatgtaagtacttcatcacattggtgagttctttttcaatttagttttagaaaaattttacttgagtatgttaatgaaagtatgaaatgtccttgcattttttcaccagatgtgaaaggggggccactgagagattatcagattcgaggactgaattggttgatctctttatatgaaaatggagtcaatggcattttggctgatgaaatggtaaggaattggtagctaaaaacacattctcagttatcaatgatttttatgtaaatttgaaaaacctgagcttacctgcccccctgatgcctggaggctttttaaaagttgttatcatgtaaaaggtattttgtagtcttagaattattattatttttttgagagaggatctctttgtgtttccaggcttgagtgcagtggtgcaatctcggctcactgtaccctcgacttcctgggttcaagcgatcctcctgcctcagcctcctgagtagctgcgactccaggcacgtgcccaccacactgggctaatttttatttttatttttagtagagacaggtctcgccacgtcacccacactgattttgaactcctgggctcaagcagtcctcccacctcgacctcccgaagtgttgggattacaggtgtgagccacagcacccagctagaattgtttcgttaagtcaccgctagaacacagactttcacaggccataaaactcttactgagctttcctcaaatggtccaaaaaccttctctgtacttttgtttttgtttgcattttggcttccaggaagcacagagtcaagatggatgcccaaatgatgcctttatgtaactttttttttaaaattttttgagatggagtctcgctctgtcacccagactggagtgcagtggcacgatctcagctcactgccacctccacctcccaggttcaagcaattctctgtctcagtctcctgaatagctggggttacaggcgcctgccaccacgtccggctaatttttttgtatttttagtagagatggggtttcaccgttttggccaggctggtcttgaactcctgaccttgtgatccacctgcttcggcctcccagagtgctgggattacaggtgtgagccacccccaccctggccttatgtaacctttaatggtctgccctgtgtgtccttctgtcttttcctattctttatctacttgtctttcttactttccttgtcgtctctttatttctattttgccattaatttatgttccatgttttcattgtaggctacctgaaatccttttgggaataaggtggggtatacaaaccaaacaatatgtaaatgactgcctgaatatatgcatgtgtgaatgattatcaatattttgacttgtgaacaatcaaaaagtgcataggtggaataaggaacgaataaagagtaatgttgaatcttgatacagtacagtgcatggtggggctttggaaatcagtgaaggagttataaatgtgtaaataaaataactgaacaggaaaaagtaaggcatataagatgctaattcatcagctaaagggggaatacatgaaggcttttttttttttgagacggagtctcgctctgtcgcccaggctggagtgcagtggcatgatctcggctcactgcaatctcctccttctgggttcatgccattctcctgcctcagcctcccgagtagctgggactacaggcgcccgccaccgcgcccagctaattttttgtatttttttagtagagacggggtttcacgatggtctcgatctcctgacctcgtgatcctcccgccttggcctcccaaagtgctgggattacaggcgtgagccactgtgcctggccccatatttgtattttaagaccaaattaataaaatgcgatttaagagagggcagggaaagttctaaatccatataactcaatgatactcatatttatgtgactctgaaaccatacttgtaatcactattatccagaagagccacatgatgatacgtgccctatggcgtctagtatagttggtagtcagtcgcataagtactcatccctggttgagcaactgttaggtgtgtggcagaggatcccttaaagcaagggtctgtagctccttatatttaggtattctagtttgaagactgttgtcagctcagagggggaggagcttggttaattggacaatggaaggaccaggattatttgccccaagcagctcttggcttcagcctgtctaaacatgaaggatctgatctttagtgatgaatttgtgctgatatcagatatatgtattatatatataatatataatatataaatatatataatatatacttactttttttaatatatatatataatttttttttgagatggagttttgctcttgttgtccaggctggagtgcaatggcgtgatcattgcttactgcaacctccacctcccgggttcaagcggttctcctcccccagcctcccaggtagctgggattacaggcgcccaccaccacgcctggctaattttgtatttttagtagagatggggtttcaccatgttggtcaggctgttctcaaactcctgacttcaggtgatccatctgcctcggtctcccaaagtgctgggattacaggtgtgagccactgcacccagccgataccagatatgttttaattactaaaaaatagacacttttaaggagtatagaaaatttggaaaaaaatgaataattaaaattaagttataattctgctacttagaagtaaccacagctaacattttggcatatttcattttagtctttttcttctggatgtacttattttgtatagttgaaatcatattgtatatataatttggcattctgatttatttacattcatacatatgttccatgtaattaagacattttccgaacataattaattattgcataataatccttgggcggtaccataattttattcaacttctctcttattgctgttcatttggattgcccgatgtgtagtgtaaataatgccactataagactcttgtaatttagtttttgtgcacctctcagattatttccgtaggattcctagaagtagaattactgggttaaggagtataaacattttaaggttttgatgtatagtattcataaaagttgtctcattaagtgacatatcagataggatacaataaaaaaatagctttaagcagacatttataaaaagaagtatatatcttgctcagagataaaaccgaaagcagttttaagaggccgaaaaaggacttagttccctttcttatgggttaggtatgggttcatagatattgaatatattattttttaaaaagtcctctggagttggtgatctctctcaggttctttctggctgcaaagttctgttttgtggttcctaaggttcttaagagtgtgagatgcaagtacagagccacaagccccttgagacacatagtctgaatatttaatatctgggctgtaataatgttaggaacaataggaaagaaagaccagtatctaagcaggctggcaaaggaagcgggtctttataaaacaaacacacagaaaattcctaacttcagaacaagaagaaaaattatatagtagattgcttgctcctttaggaggaaaatgttctaaatagaaagttgctttgttgagcaacattctgactgcaagttattggtttctgtttgtgctcacggtaagtacaatactgaattggaatgatttggttatcttctttaaaaaaaggtatttggtatttttacttttcattggtagaaacataattgcctttgcgagatagtggacaaagatcttttgttatgttgttcctaacaaaatgtttccttacagaaaaaatgttcatggatttttttccttgtgatgataatgcagggccttgggaaaactttacaaacaattgctttgcttggttacctgaaacactaccgaaatattcctggacctcacatggttttagttccaaagtctactttacacaactggatgaatgaatttaaacgatgggtcccatctctccgtgtcatttgttttgtcggagacaaggatgccagagtaagtgagaaacaagtgtaaaaaggcagttaagaataatatcatttctggagtttagttacatattattgctgttaaaaacatctgagttgactactactaaataagacttaaggtgtatgtactctaagctagactctgttttaagtgctttgcatctattaatttaattctcacaacactcccatgaggtagatatatcacctattaataatagacaatccattattatgcttcatctacatttgctttagttcattaacctaagcatttttgaattgtactttgagtgacttttcattaaaaacatcttattttattgacagtatatcttaccagtgactctcatttgtgctattttgaagccaacaatatataaatttgcattacttaaaattttatatttaagtttttgacttttgacttggtgtacacacacgcatatgcatgtacacaactggaacctcttctatatgtacagagagcctcgtgttttgtgtttatgcatagacgcagctttcagttttggtgtttgaatagaaaaatacatgtctgtatatattctcaggtaatattagaaactgggcattttaggggggtgtttaaatcagccatttgtcagtctagtaggctacaatcattttaggactgtagaattaatctaaaaataatatattatgtaaaaatactaaaacagataatctgcttagaaagcttattattaaactttgtctttatttgcctccagagaacacagtttagagatgtattcagttttccatatttagataggttatctaaagatatcctcaaaagaatggtagtgcaatgaattacataattttatccttatcattttgcttgaagaaaaattacttaaatttatttaaatttaacttacaaataatttaaatattgaaatactgagctcataagtttacaattacaggccagattcttccctatgcctaatatttccctaaagcaaattagtcacttagaactctttctggtcaccattgttatctaatgtaataccactccatataaactttgcatttctaaagtattgagcttttgctaaaattatttcttaaagattaaaagcaaaagataaatatctaggtttgtgttttcataatgtctcggtatatttaatttatgactgccctatctctacttcctggggaggctgggattctggtggcttgaaaaatttctttgtttctttttccagaggcggggtctcgctctgtcgcccaggctggaatgcagtgatgtgatcatagctcactgcagccttgaactcctgggctcaagcgatcctctcacctcgggttcctgagttgctgggactacaagtgtgcaccactgtgcctggctttgaaaaatttcttaatcttgaaaaccggtcttcaaagttagtgtttttcaaattgtgagttgctacccattagtgggttgtgactttagcttagtacttggtaaaacaattttctgcaacattgagagagaatggaatagcaaattgcagagtgtttcatactataataaggataaatattgctttgagaaacttttaagttgcctctttctgtgtacacacactcaaacatatatgtatatactggattgcaattcaaaaggtaattttactgtgggctatggtcaaaagagtttgaaaaccaataattgccagttacataaataataagtgtaccatgttcagcacttagagattgatgtggatatgtatagaggaagtccagatcattacatatagacagatttgaatcttggtagaacataggatagatatgttgggtctttgtattttcctggtcttctgtaaacattttatgaaggtaatattttagtaataaaaatttgatgtaggttataataggcatttaattgagttgggagattattagagatactcttgatcctgtctgattgataccaatgtgctttgtggccccttccttttccacgccagaggtatcaaagatagtagacatagaaatgggtttgatttcagttgtggctttgctactgattgtgtagggttgagtgagtcttcaagggccttaattttttcacctctaaaatgagagcttttggattatgtgacacctttaatgttttatcgagatgtttaactctaaatgtatccaatagttacaaaaaattcaaagcagagctaatttaaattaaaaatatgcatttgttgcatgaaacttgtaggcgaaaccatgaaactgagagcttcacaaaatcaaataaggataaggtgttagcacgactgaatggggtctggcactctacttctctttattttgtctcctattccctaatgtcttaattaaatttataaatgtgatcacttcccagggtgcaactgagatctctgaaaaggcctttttttttctgtcctcctcttcagtccaggtgattctcttatacatagtagacaatcagtaaatatctgttgaatgagtctgcagtgtgtttagtgcatagttgtgaattatgaaataaagactttgcagggaacagttaattttgtttatgcactgtaactccagatttataaaacttttttttttttttttgagacggactctcactctgtcgcaaaggcttgagtgcagtggtgacatcttagctcactgcagcctccccgcctcctgggttcaagcgattctcctgcctcagcctcccaagtagctgggattacaggtgtgagccaccatgcccagctaatttttgtattttttagtagagatggggtttcaccatgttggccaggctgttcttgaactcctgacctcgtgatccatctgccttggcctcccaaagtgctgacattacaggcgtgagccaccatgcccagctagatttataatactaatcagcctcttcttaatatagattttgctgcttcccattaacttttgtggttttattttgactgataacatctggaattcagctcatacaagttaaaaatgctctcagtcaacttacctaccatgttggccactgcctgtgaagacttaaaaatagttttaaatagtctcattgttttccatagcctcctgtactagacagagcaagtcccctttatgaaatcatatttgtaacctcatggcaagatctggaacttcacaaaaacattagtgggcttccatgaccttttaacaaagtatatgagtcagcccagctagaaaatgaagaagggacatacaagagttctccaaaggttggaatcattcatgcacattgagttctatttgttgaaactgtatcatgttggtaactcttggatcttggcaagaatatgttgttcagaaagagttactttgtctatgttcttttggatgccccatgatatgaagacaagcccagtaactttgtgatttctggtcatacgaacttttctaggtcattgaatatgccatatttctgtaagggaagcctttgtttctcttctgttaatgaatatattagcaggtcatccagataattgaccacacaactatctttgggcctcagttttcccatctctaaaatggatgaaactaaatgatcctcagggtctcttagaattcttaatattttcttgatattttaattctgtgatcatcttataacatattctaatataaatatattctaatatgaagtattttattttgcattaggctgcttttattcgtgatgaaatgatgccaggagagtgggatgtttgcgttacttcttatgagatggtaattaaagaaaaatctgtattcaaaaagtttcactggcgatacctggtcattgatgaagctcacagaataaagaatgaaaaatctaaggtaagttatcaatatctttattaaagtttacatttaattaccaggttggtttgttcacttttctgtattcagaataaaaaatgatggaacagccggtgtggtggctcacgcctgtaatcccagcactttgggaggccgaggagggcggatcacaagatcaagagattgagaccattctgaccaacatggtgaaaccccgtctctactaaaaatacaaaaattatcagggtgtggtggtgcatgcctgtagtcccagctacttgggaggctgaggcaggagaatagcttgaacccgggaggcggaggttgcagtgagccgagatcgcacccctgcacttcagcctggcaaaagagtgagactccgtctcaagaaaaaagatggaacattgtgattttattcatggaatgtgaatgcaaatctaaattattgaatacaagacacattaaaattgagcacagtttttaatgtaaagaaaattaagtgttcctttggtatacctcctgtgcctaactgttatgctgtagtattttaatattgttgagaatatttagtgtgcaaatatcgtttgtattgatttattttttattgaggggctaccttatatatatttatatggatgagagaaaataatttcctggaattatctgacttgtgtgaattagagtgtggtgttaacactgaaaaatatcaatatttcttgccattcaactccatcaacagtaggaaaagcttcaattatgatgaacctctctttggatcactgggctaatttgggagaaacagggacagaactggagcaaaaccaccaggtggattatactaatttcaaattggaactaatatctgataagaggacacatgctagagaataattttttatttaagagcattataaaaatgtgcatttttgttcatatgattaccattcttttgtgctttttgtgtcttaatttttctggtcttatgtttagaaagttaatataagttactgggaaaatcggctcaattctggggcttaaaaattgtgaccaggccaagttagaacgtgtctgggcatgtagatgaatgtggttggtggggagatggagattttattgtgtaaaatggctaacctggattccatggagaagttctgacctttttctgtgagcccaaaatggagaaatgaaaattttgaagttggggggagggtctcaggtataaatatgatctgcattcttcttcctttttttttttttttttttttttttgagacggagtttcactccgttgcccagggtggagtgcagtggtgtgatctcagctcactgcaacttccgcctcctggattgaaatgattctcctgcctcagcctcctgagtagctggaattaaaggcgtgcaccaccacgcccagctaatttttttttgtatttttagtagagatggggtttcaccatgttggcaagtctgtctcaaaccccagacctgaggtgatccacctgccttggccacccaaagtgctgggattacaggcatgagccactgcgcctggcttgcattcttttaagtatagaaatgtttagttttgcctcactgcagcattgtcacctgaactagggtatttttccatagaaaattttcaagttatattgtagtcaaaaatatattggttggataaattacagtataactgaatgttgagcattctaataagtaaaataatcctcatatgagtattattttctagctttcagagattgttcgtgagttcaagtcgactaaccgcttgctcctaactggaacacctttgcagaataacctgcatgaactgtgggccttactcaactttttattgcctgatgtctttaattctgcagatgtaagtttaagccatacgttttaagtataactttcttattttcactgacatgtgttttaaaacattatagattgaaatttatggtactttttaatttgtaattttttatctgcatgttttggttttcttaggaaagagttctttaatagagttttaaaatgaggatctttggagaaatagtatgcttcttgtctttgagatcaacttgcctgttcaattttgtctctatcacattactcctaaaacttatgatgtgaggctgagtccatagtagtgcattcaccattttattttcattaagttgaaggggtttgaaacatatttttatatactagtttggcaggtggaagctataaaatgatctttgattattgtaggcattgacatttggtgagtgctaaagagctcagagtatgtgatttgaaagacagcatattgtgtaaatgtgttatttatatatatatatttttatcattaacacaaatttatgctaggacaccaaactaaatggaaagatttaagaactttggtgcttgatttttcccattattattattattactattttgagagggagtctcactctgtcccccaggctggagtacagtggcacaatctcagctctctgcaacctccgcctcccgggttaaagtgattctccttcctcagcctccccagtagctgggattacaggtgcccgtcaccacacctggctaattttttgtatttttagtagagacagggttttgccatgttggtcaggctggtctcgaactcctgacctcaagtggtctgcccacctcagcctcccaaagtgctgggattacaggtgtgagccaccgtacctggccccattatgactgttaattgataataaaaagtagcaagtttggccataagttgctttgcacactttatcttgcttttgtttgttttattgtttggtaaaattaacattcttattagcattatgtctttgattttatattctacttttcaaactagatataatattgctacagtatggggaagcctaataaatgtcttttaaggaaaaagttgatggaattcttacacagtggggctcaaattttgttaactgctccagtattttacctattttcagaagtaaataatagtagctatcacagctgataatatttttgaaagtactttttaaatgcattatttccgtattggttgtataagaatctacagaatatcgggtatatttaaaaaaactgtgcactcattggagaatttccacccctctacaggactttgattcttggtttgacactaaaaattgtcttggtgatcaaaaactcgtggaaagacttcatgcagtaagtaatagcagacaagaacattcagtaattaaatagtatacacaaactgacccagaaaacaaaatgctatggaatctgtttgaacttgtgtttgcctcttggctcaatgtcactgtttctccctcctaacctttctgacagcctctttgttttttttttttttttttttttttttttttttattcctctatgtcctcagcctctctctagaacagcttttttcctttggctctcccctgtgaataatgtggtcctctccaatagagaggctgttcctgctcccacaccccacagttcctcaggatggtatcggtattctcctagttcacccactgccacttctaagctactgcttctccactgtcatgtataaagctcttcctttgaagcctaagctgtcttgcagttttatcctccacccattctgtttcctgttaatctgttcatcattgggtggctccttaacacattgtatgccaggctggagtgcagtggcatgatcttggcacactgcaaagtccgcctcccgagctcaagcaatcctcctgcctcagcctcccgagtagctgggattacaggcgtgtgccaccacgcccggctaatttttgtatttttagtagagatggggtttcaccatgttggccaggctgatctcgaactcctgacctcaggtaatctgcccgcctgggcctcccaaagtgctgggattacaggcgtgagccactgcatccgacctttcttttcttttctttttttttttttttttgagagagagtctcgctctatagcccaggctgctggagttcagtggcatgatcttggctcactgcaacttctgcctcccgggttcaagcgattctcttgcctcagcctcccaagtagctgggactaaaggcacgtgccaccacgcccggctaatttttgtatttttagtagagacgggttttcaccatgttggccaggctggtctcgaactcctgacctcatgatccacccatcttggcctcccaaagtgctgagattacaggcgagaaccactgtgcctggccccaactttctattctttgatcgcaatttctcatctctttctagtgctttcgttcatgttaatccttctgtacttgtcctgttacctcacagagacctctaatccccagacctctgcattttctccccatctatcagcttatttctgttgtgacttttttctgtatccagcaatgaactcattttctatcacttgaaccatctttggctagtactcctaaactcccttgctcccttctccgtctgccatacctgcctaaaaaccgtaacctggaataatgtaatgtaactgtctctctgtcttctgggcttcaattttgcttctgctgcttactagcagagtggacatctctgtattggggcagcccaacactggtaaagaagatttcacaactgtccaggttggaaccactgtgattccatgttctctaacataagctgagatgtcatgatactggtgatccttcagcatggccttctacagtcttctttcctgtttcctataacaactatttcagaccttccccagtctccccaagatttctatcccaggtatctcctgccctccttctccctcatcaggtaacatcattcctttctcaaaaagaaaaaagaagacattaggtaggaagtccttcaaggatgtccaccttctaaggaggtctgcatctgtgttaccttctgtttgagtggaagaggtgtcttttctctggtcagtggctaattcttccatgtgaatccttgatctcatctcttcctattctttatggactttcccccatgatttatctttttagttgactatattttctacctctttttaattgactatattttctatctttttaactgactgtattttctacctctccatccatattgggtcttttccctaagtgtaaacatgctcaggtgtctcccttattaattccaaatccaaacacgtacccatccaccctcacacatatgcaaaacagtgctccctcaacactgtgtccctctggctgtgattccgttttcttcccttgatagctaagctccttgaaagagtagtttatcctctccatatctactccctagtctcctgtttactcttgaatccattggccactggcttctatccattccatacaactgaaatttgtctcacagtgtcttcaatgactttccagttgctgaattcagggtacgctttttggtcagtatcttggctattgctttgaagctgctaactatctcctcctgctggaaactttgctgcttggtttctaggatactgttctcttttggattttcttttaccctttgtccacccctatcagtccctttcgtgggcttttctttctttgactgtctcttataaagtttaacattttataaggctttgtctttgactttcgtacatgctctccctggggatccactcccatggttttacctaccacctatatactgacgcctcctaaattgacctctctgtatccttctcctaagcactatactttcatatcccattgccttcggagtctttttgcttaagtatctcacaggcagtttaaactcttaaggatatcttttagaaaactttgaggctcacaccagaagccagaagtcttcttttactcttcccctgtccttacctcccatagatctctaataataatagctacagtttattgtctgctatatacttaagttctacacatgtaccaccacaaatttccacagcagacttggaaataggtatcattatccccatttaaaaatgtttggccgggcagggtggctcacacctgtaatcccagcactttgggaggccgaggcgggtggatcatgaggtcaagagattgagaccatcctggccaacatggtgaaaccacatctctactaaaaatacaaaaaattagctgggcgtggtggctcgcgcctatagtcccagctactcgggaggctgaggtaggagaatggcttgaacctgggagacggaggttgcagtgagccgagatctcaccactgcatttcagcctggtgacagagtgagactctgtccccttccaccccacctccccccccaaaaaaagtttggcgggccgggcgcagtggctcacgcctgtaatcctagcactttgggaggtcgaggcgggcagattgcctgagctcaggagttcgagaccagcctgggcaacatggtgaaacctcatctctactaaaataggaaaaattagccgagcgtggtggcgtgcgcctgtagtcccagctacttgggaggctaaggcaggagaattgcttgaacctgggaggcggaggttgcagtgagctgagattgccccactgcattccagcctgggtgacagagcgagactctgtctcaaaaaaaaaaaaaagtttggtatatacacatatcatatatttgtttttggatgaaccgatgaggaaataggcttggaaaaattagagaactttcctaggctcacaacagctagtcaggactgagctgattttagaattagcctgatctgggtttgaattccacatctaccacttgctagcaaagttcctttgatggccttactaaaatagaaatgataacatttctttcagatttatcgtaaggattaaataatacatgtaaagttcatagtatagtatctggcacattgtaggtaggtactctatagattgtagcactattgtcttgtgatataacctgtcttccaggtatacactgactattttatctttttttctctattcatctatattttccttcatattgaatattttctcctcatttatatatttaactacagtcatgcactggcataacagcgttatggtcaacgatggaccgcatagatgatggtggtcccatcagattataatggagcatatatagagacctgatatatggcacttgatactggcattgcagatcaagtaggggaaatgattgatagtgagtaatagtgctgggacacgtggttttctatatgaaaaaacaaataaatacatataccatgtaggtttgtgtaagaacactctatgatcttagcacaatgatgagatcacttaacaacacatttcttagaacatatccccatcattaagtggcacatgatggtactttgaaatgacctgcatttttatttcatttttgaagactccctgatcgatattctgacttcagatttcctctcaggtttaaaaatcttgttgtgggctgggcacagtggctcacgcctgtaatcccagcactttgggaggccaaggtgggtggatcacggggtcaggagttcgagaccagcctggccaacatggtgaaaccctgtctctactaaagatacaaaaatgagccaggcgtggtggtgcatgcctgtaattccagctactcaggaggctgaggcaggagaattgcttgaagccaggaggcggaggttgcagtgagccgagattgtgccattgcactccagcctgggtgacagggtgagactctgtctccaaaaacaaacaaacaaacaaaaaaatcttgtgttacagcagcttcttttttttttttttttaagggttctttggtgcttattcagcaaccaatagtcttgttgtcttaatttttcatgtattttgtgccatgaagtcatgaatgcctactttaggtcccctattctgattttctaatggactcttacttggtggttctttaccaagaaagttcgcaactggtattggtagtatttgtcagactatgcagtgggaagtaaatttcacattaatgttgttaatgaaatacattattaatcatattaaatgtttcataaacttttataaaaatgatcaccttttaggttttaaaaccatttttgttacgccgtataaaaactgatgtagagaagagtctgccacctaaaaaggaaataaagatttacttggggctgagtaagatgcaacgagaatggtgagctatttcatttcctttaaaacttatttgtgtgtaagaatttactaaaaattagctttgtagttgttcagttatgccattagttcaaaaattacattttatatttaaatggcaagttaagtagttcagatattttcagagaaaatttgtaagtattttatttaaccctttgaaaagagtataggttttggagtctatagatctgtgtttgaattccatgcattaccacttaacagctagttatcttgggcaagttacatagcctaaatttccattctgtaaaatggggataataatatttaatttatgaggatggtgttaggattaaagggggtaatgtcagtggcatgcttgttagttaaaaagcattctttaaaagcattctttggccaggtgcagtggcttacatctgtaatcccagcactttgggaggccaaggcaggaggattgtttgagcctaggagttcaagactagcctgggcaacaaagtgagaccccatctctacaaaaaataaaaaataaaattagctgggcattgtggcacacacctgtgtttccagctacatgagaggctgaggcaggaggattactggagcccaggaagtcaaggctgcagtgagccatgtttgtgccactgcactccagggtaggcaacagagtgagaccgtgtctcaaaaaaaaaagcattcttgctttttccttcagtgaaaataattataaccatattactagtgttgatgaaaatgttggtgattgtggatattacaaaaatagaatctggaatggttagataaatgcacttaaagcaggaaattgacaagggaagtcacaaggaatcataagtgggaagtgttaataatgtaatagtgctgctaataggagcaaaatgttacgtatataaatacaattagatcatgtataaaatatatgatttctttactacataagccagtatagggtagagattaagagtatattctttggactcagactaagatcacagcttggttttgtcccttctgtgaccctgagtaagttgtttaacttctcttagctgccttaatttccatctgtaaaatggggatgatactagtaaatactcagaattgttatgaagatttagtggcataattcgtataaagcccttgacatgatacttggcacttgcactcagcaaaagttgataattattataattacatattatcattgatcgggtgtatatatatatgtaagtctctgtgggggtggaattgtagaaaagagaatgaaaaatatttataggatcagaaaaaaatgacctgtgaagacaggtataagaaattgaaattgtttttagttcaaacaagtaaatgttggatgtcaaattcaggcaaatgttgtagttactgataattagcagatagaattctctaaataattgtcaactgatggcagtttcttgtcatggataaagcaggaggaaacaggtttataagcaacacacaagttcacatgttcaaatattcattactttgtaggttttgcccattagatttaatctcaaatcaaatcttgtttatctttaaacaggaatctaatctgatggccaaaggaacatttgtttatgacattaactttctagtaattgatgattaattatagtttaaatttttaggtatacaaaaatcctgatgaaagatattgatgttttaaactcttctggcaagatggacaagatgcgactcttaaacattctgatgcagcttcgaaagtgttgtaatcatccatatctgtttgatggtgctgaacctggtccaccttataccactgatgagcatattgtcagcaacagtggtaaaatggtagttctggataaactattggccaaactcaaagaacagggtgagtaataaatttttaaattagcatggaataaatttatattaatgacttgtatataaataaaattttccatattcattcattcacttattcagcagacattgttgagtacttaccatttgccaggaattgtcctacaggctgggtgtacaaagatgaataagacaacaatctttgccttggataagctcacagtgtagtgaggaggaatagttgcaattcattgtgataagtgctatgatatgttgagaaactgggagttgggaaagtcttcacagagatgacctttgaggtgagcactggacaatgtgtaggagtgaaccatggggaaaaggaggggaagggttttccagggtaatgaaacagaggcgtgaaacaagggaacacagagagcatatggtacttggggtagagtggcagttgatgaatctggaaagatggatggagccaaattatgaacggtattttaaaccatgccttaaggagttaggacttttattttgaaggcagagggagtgtcagagaagacttggctgtgaagagtgacaatcggagtatgtcactcttacatgttaggaagagaaccttgaaagcagtatgggggtctattgaggatgagagactaggaacaggagactagttgggagactattgctgtagtccagtgagagagcctgtggacccatcattcatccttaagaaaaagtaaaggcaatcttttaagtcgttgcaatatgtgtggaggattttgaagaccttaaaaaatgccaaactcaacaaatgcataattctatatatagcatctcttgaaggtgtgtgggggtgtgtgtgtgtgtgtgtgtgtgcacgtgtgtgtgtgcgttagtggagtgttcatgtgctctacatttatgttgcatatgtttattttgtagcttttaagttagtttcacacaagttgtacaactcactttttcttggtgaaatgttttaggttcaagggttctcattttcagccagatgactcgcttgctggatattttggaagattattgcatgtggcgtggttatgagtattgtcgactggatggacaaaccccgcatgaagaaagagaggtgaggaagagaaaataaaataagatttcagaaatcagagttcaattaagcaatgtatatcaacattaggtagttttgaacttttgccttttctttaggtgggtgcattgaatttctcattagcatctctttctctcttcaatcttcagtgtggcttccattccattgattctttacaaatcatctttttcaaggtcttcaaagacatcaccacttatctaaagggcactacaccatcccatccttattttctctaatcatgcctatctctgaccttttaaattactaacagtttctcaccttactctctaacctccaatttcatgtcattttcttttcctaatttgccagctatagcagacctttgccatttgtggagtttaatggttgagattttgccagtttataagcaaccctaaagactcatgaagcatagtaatccataaagggaatgatcttggttcttatagagctcttgtaaaaactaaatgtgacaaaataggtataggtatttatcatgaatttaaacattgggacactaaaaggttggcctgcaggaatgagtcacttagtgagtaagcttatctagtatgcagtatttttctcaaacatggaaattcttacagatctttagattattcctcacaaatgtcatgggtctaatgcgtttaataccctttaaagcacttttgcttggaaggctttgctaatttatcttctgttttctgtgatccttcagagctctgtctttggcttctgttttaagtctgtacagcaagtcctcacttaatgtcgttgcaaaaaaaaaaattagctgggtgtggtggcgcgcgtctataatcccagctactcaggaggctgaggcagcagaattgcttgaacctgggaggcggaggttgcattgagccaagatcatggcattgcaccgctccagcctgggtgacataatgagactctgtctaaaaaaaaaaaaaagataggttcttatagaaactgcgacgtcaatcaaaacaatgtatgatgaaatcaattctatcttaggctaattgatataaacaagatttaagttctggccaggtgtgttggctcatgcctgtaataccaacgtttgggattgggaggctgaggcaggaggattgcttgaggctagtcagtaaagactagcctgagcaacatagcgagacccggtctctacaaaaataaaataaaataaaatttaaaaaagcattagtcaggcatggtggcatgcacctgtagtccttgctcctctggaggccgaggcaggaggatggcttgagcccaggagtttgaggctgcagtgagatgtgattgtgccactgcacttcaaactgtgtgacaggacaagaccccagttcctgtggcatatttctggtcacaaagacatcaccaagcttctaaataaagaccaaaacacttataatattaaacatggaaataaatgtgagccatacatacgtttaagaaagattaataaaaacaagtaagataattatttacctgcttattccagttcaggattacagtggttggagcctcttctggcagctcaggaccccaggcaggaactagccctggacagaatgccattccatcacagggcatgctcgcacacacaccactcacactgggaccatgtagacatgccaatttgctttttgtgcacagctttgggctgtgggagggcacagagaaaactcatacagacatggggagcacatgcaaaacccatatggacagtggccctggccaggaattgattgtttttttgtcatcagttttataatgaaatgatgttacttgaggacctgctgtactcatgctttgggtaaagatcatggttttatggtatagtggaaaatgcactgaacttggtttcagaagacctgaattttagcaccaacttcaccactttgcagcgtgtgcaagccatttaattctctgagcctcagtagctgtaattctaaggatagtaacaactaggcttctttctctgacaatgttgtgaggatataataggtatgagcacagttttaaacggcatattgcagtacgtactgcaggtcatgaaattgcacccaggcctttctcccttacacctttagggccccatctcaggctacaaggactctctcttagcccgcatccctctccttctgtagctgcaatgggcactccgttccttgtgtgcctccttattgaagcctgtttctagcatagcatagtgttcacagcaagcacacagacccttttcatattaaaggtcttactgctacctctatggggaaacagttgcaataacatttatacgtatgaggatatttcaaggcttacactattccgtgtgctatagttttttcactctctctgagatggcaacttgaagcgttactgagcttttgctgacttattcctgaggattggtttccctgaatccatactaaataaggccctatggtaccattcaggatgatccttcttcctaggacaaagagaatatcatggcagagcagtacgtgctttctgacctcaaatagccaatttgcatttctgactgagctgtctactgtttacctatttatgtccaaattgttctggtttttaaaaattccaaacaatgttatcccctcagagactctgaatttcatgtattgactttaaatatagcaaagtcagagctgttcctttcttcttggaaatgccctgctttccctttatgttgtccacaccatcatttcatctattttcccaataagaagaagaccacgtttgattccttactttgattgtgtgccagctgtgaataagtaattctttctcaacagctctcagattttccctttctccattactacagctaaattcagctaacaaagccactggtcatcgtctgactcagttcctgtaacctctgcttaattggcctcctcacttttatagggaaaggaactaacatttgtcaagcaactactataagctaggcaacttaaagttccaattgaattctcccagcagcgcggtaaagtattggtataattttctccatttgaaactgtgtctcagagagattaaatacttgcccagaatcacagatgtaatcagtggtgaagttgtgattcatgcccaagtttttgctatttcctctacgccaaggtgcctctcactacaccacgctgctttctatactgccccctttacctgctctgctgactgtgacggtggtagttaccttctctgcctgaaactttgaccatgccatccatttattttaaaaaagattgcccatactttgtgattatgcaagtaatatatgactgctgaaggaagttttgaaattaaatacaagtatttctggcctatctttttaggtatatgtaatatgtataagtaattggtatcagacttcatatactatatgtaaagtacagtatcctgatactatttacttaatattatattgtactttttaatgtccataaaaaataattgtaaaagtaattttaggataatatttcaccctatggatgtactataagtaattcatccccctattcttgatcgtttaggttgtttcaaaattttcactattataaataatgctatagtgaaagtccttatacataaatctttgtgcacatctctgattatttccttaggataaattcctagaagtggaatttctgggtcaaagggtatgaacatttttaaggctcttgatgcatattgccaaattgctttccagaaaggttgtaccaatttatactcccagcagcaatgtatgagagtgcccgtctcaccgccccctcatcaacattgagtattatcattttttttaaatcttcaaaaatgttattatgttgttttagtttgcatttatttgattactagcgagaatgaacattattattgtgttttctaaccatttgtatttgttctgtgagttgtctgttctttttttctgctcatttttctactggactttgtttttctaattaatttgtatgagatctttatatagtaagaatattcatattaattttaacattctttactaaatatccctggattgtcatcctgattttcttcattacttacctgcttgttccttgttaccatactgatagaaatcttcttactttcccctttatccgttgccctcattcccatttgtaaaccattttctctgttggttgatcttctaaactaatcattcataagctaatggaaatgaagttgagatttctgatattttacctcctagatatatttcagctctcactcaaaacgttttcattattattgtttttaaataatgtaaatgaattattacttgcttagttaaatttgtgtatgtaattgttctaaatttgtatctatcgatgtaagcttttaaagattaggaacttcatttatataatatactttctacagaaattcacacagtacagtatatgtatagatgcttacatatttttgaagatggaagaatattataaagtatatttataaggaatattataaagtgtgtgaagattttctatatgtattttaaatgtttttatttgtttcttaaggaccctgatggtctaattttatttttctctttttcttctatccctttatcaataaaaaataaaggaagcaatagaggcttttaatgctcctaatagtagcaaattcatctttatgctaagtaccagggctggaggtctcggaattaacctggcaagtgctgatgtggttatactatatgattcagactggaacccacaggttgatctacaagctatggttagtaatctttaatggtgtcagaaatttatcatagctctgaatactattgctatttacacacataaaggtcatttatgataaaaaggtaacaatttttgagagattttatagaagttacagtagattatcctggaaaacacagttgctatgctaattgcaaaaacaaaagaaatgaaagcgaacaacaaacacaccccagatccaacttatagcatttatgtgttgattttggtttttttcatgaaatagaaatgtcagttttttcccattcctacagattgaagaggacacataaatttgttttaatgaaaaggattaaaaaacaatctcttgttattattctgttcaacaactaaatatattaaaatccttagtactgaaattaagagaggtaggattttaactttcataaaaaacaatttgggagagaaggcaaaaaggtaagaaaggaatatattccagaaaaacacttgctacttaataatgataccatgcaaaagctattctacacttaaaaacatttttttttagggagcaaagtttctctgacctttcatcatgacactacaggtaacccctttgatattttggtgtcatttattgaactagagctacaacttctctcaatgtgactcacattttcagataaagaaatataatttagaagtaaaaagatgcaaaataacttcttaggttttgaatatatagctatggataagtgtctttttgggagcaatgaaaagtcatatgccaatgaggtataacttagaaggctttccttttataatagagaattgaaagggattgaccactgggacattccaaaatcaatatgctttggcgtaattattattgcattacgatggtattgaactacctgtttgatatgactaactaggagtaagccccagtaagttacagtgttactgaactggaaaatctaatagtgatagcacttcatttccgtagaagtcttagtgtgcatcccatctttcaggatttgctggttcaggtttaatgtaaatatgtgcaggggattgcattctgtttgaaaaatgtgctgtgttgaaactttgttactaggctctagtgtttttatatttagtacaaggcctgttttgaacttacattttttttttctctaccaccctcctccctttacctatttgctctagcagcttctgtgttttaaaaatactctccctagatggttttataccactagaagttcgccacctgtcacctgtaccaactataaaccataggaccagtcctaggctactgaatagtaaggatagtaatatcccattaatttttataactctttactgcatatccctcagtaagcagaaagaagtgcctgatgatgaaataaagcagacttttgccaccatagcaaccctaactacttaataaaattccttgctagtttcgaagatgtttatatttagtggcttaaagttacttagtaactcaatccagaaactttcagctccctcttttattcatcttacaggtgctttgccctttgtcctggaagtttcccattaatggtacaatataatatttgcagatttctttgttcccagtggtctttagatattctcaatattcatcatgctcttttccaaagtgtcagatctagagaaaaataactaattttatttttagaattttatagcatatgatggctctaaattttatccagaatatccaatatcttacattagaactctttctactaggatcgagcacatcgtattggtcagaagaaaccagtacgtgtattccgtctcatcactgacaacactgttgaagagaggattgtagaaagagctgagataaaactgagactcgattcaattgttatacaacaaggtatttatacatagaaacttaattaggtgttttttgtaaaacacatgtagttttcttcaaaggagattacttttaataaaagttgaccaaaatttgaaaacttagaggaaaaattgaaacatcactgtgtatcccatgagtctgtacaattgttatgtatcacctaaaaataaaaggaaaaaatttaaaaatgctaattgaggctgggtgaggtaggtcatgcctgtaatcccagcactttgggaggccgaggcgggtggatcacctgagatcaggagtttgagaccagcctggccaacatggtgaatccctgtctctactaaaaatacaaaaaattagccgggtgtggtggcgtgcaccagtagtcccagctactcaggaggctgaggcaggagaattgcttgaacctgggaggtggaggttgcagtgagccgagatcgcgccactgcactccgccttgggcgacagagcaagacactgtctcaaaaacaaacaaacaaacaaacaaacgaacaaaaaatgctaattgaaatcttctgaattgaaaccctggcatttgatatatggagtagttgaacatcactagcttattcttgaatgtcagtagcatgctttttgaagtacctgagattatttagcagataaaatggctacttttaaatttttgaaaacatattagagggtaccttttcatatagagaagtttgatctgaaaacagagtttgaacatgaaaaaaagtttctgtccttctgggttttaactgagttttacagaagggaatttatatagaaatagaaagtatgctagaagaaaaacttgtagggtttattaaacaaataaccttaatgctcactaattttttgttctttaaagctttatgtgtggttaaatgtgataatgtctgattagaatgattatgccttctttggaatatgattgattgaatatgtacaatttcaatttttatcattaggaagactcattgaccaacagtctaacaagctggcaaaagaggaaatgttacaaatgatacggcatggagccacccatgtttttgcttctaaagagagtgagttgacagatgaagacattacaactattctggaaagaggggaaaagaaggttagttaaaatagcattttattttcatgctggattgttttaatatcaacatacttcagcatacttatattttcattgtacatgtttatctgcattatctacatgtttcaggtagctcatattctctccaacaacttgtagatctatttccaggggtagattaaggctttaaaacttttttttggtgagaaagactaagaaccagagtttaaaattgagtgaccttatatctaatgctttattgaaaatactatatctaaaagccaagtaaattttgtgtttaatcacatgtataaggaatgctttttttttttttttttttttttaaagagacagggttttgctctgtcacccaggctggagtgcagtggtgcaatgataactcactgtagtctccacctcctgggctgaagtgatcctcccacctcagcctcctgagtagctgggaccacaggcatgtaccaacatgcacatctaattaattttcttttttagagacagggccttgctgtgttgcccagactgatcttgaacctctggccccaagtgagcctcccacctctgcctcccaaagcactgagattataggcatgagccaccatgcctgaccaggactgtatttttataatcttttttttttttttttttttgcactggactagaaatcatctactgatacattggttaattgaaaatcttttataaaacatttcatgaaatgctaaatcactatttgttaaagcataataagttgtttcagaatattgtaattttgtgtttagttcaccttcccctctccacaaattatggataattttaaacataagtaaaagtagacagagtagtataatgagccccgaagtacttatcacctgtttctaacaaccatcaaccagtcctgttctgtctatatccccagttatctttcccctccttggattattttgaagcaaatctcagacatacttcagctgtaaatagttcactgtgtatttctaaaatagaaggactctttaaagataatcattataacattgtctcacctgaaaaaccccaataattctttaataacaccaaatatccagttagtattcaaatttacaattgtgtcgtaaatatttatacttaaaaagttttcttttcatttttaaatcagaatgcaaatcaaaatacaaattgccatggttgagatttcatctctatcttttaaaatctataggccccctctcctgccatgtattgtattccttgtaatttatttgatgaaaagactaggttgtttgccttttgagttaatcacagtgtggattttgctgatttcatctccatggtgtattttactatgtttgttgcatatcttgtaaactggttgaatttgcttttcagaagaattttgtagttcaggtaataacctgcattttaaatgatcttgtgttaatatgtttcataccagtatgcaaaatgtgtatttttagtccatctttgcctttctcttagctttagctatttgtcccatttaaattatgcaagagcaattataatgtgggtacaacttcactgacaaaagattttaaagaaagcctaagtgagagtacttgggaagcaccatttaaatatttgaaatacttgggcaagtaaaatttgcacttcaggtttgatgttagcattgcattcataccttgtaaattagcagactggatatttcatgtcaaaacctgactattaaaaaggtagagaatccacagacttttacaagtaattcagtgataattttctcatttcaatgttttcacctttagactgcagagatgaatgaacgcctgcaaaaaatgggagagtcttctctaagaaattttagaatggacattgaacaaagtttatacaaatttgagggagaagattatagagaaaaacagaaggtaactttttactctcaaccattagaccctcaaatgagcatttctccccataacaattataaaataacactggcacttacctattataataccctgctctagagtgaaatttgatataggtctaaatatctcatgcaaggtatatctttcgtttattttattggtttatcgtcgtcgtcgtcatcatcatcatcatcatcatcatcaatttttgctgttgctgctgctgctgctactactactactactgcttagtactacttttgttattgagaagcagtgtaggattgaggttgaattcctgaattctggagctgaaatctcaactcttgtcactaattaagtgactctgggtattctcaattttctcatttatcaaatggaggttataatagttacatcatagagggattctgatgatgaaatgagttaatactcataaagttattagaataatgcctgacacttaatgttaactgtatgaataataatattagtaacatttagttacttaaatgcagaaggactttgttacatgtggtctgttgaagaaatgggggttttatttatcttgttttttaaactgaaattaaggctgagattttaaaactttttatttttaaattactttagacttacaaaatagttgtaaaaatagtacagagctaacctatagccttcactcagcttcccctaatattaacaatttacatgttagtataatgatcacaaccaggaaattaacaccagtttttctcctaatgtcctttcctgtgccaggaaaaggacattggttaattatctaattaactggtgttagattccaggggatctaatctagtatcccacagtgcatttttaaaaaaatagactttattattttttccttctatttttagttgacacatactaattgtacatatttatgggatacagagtgatattttgttacatatatacaatgtgtaatgatcaaatcagggtaactggtatatctactgtcttagcacatttgtgttgctgtaaagggatacctgaggcttggtagtttataaagaaaagaggtttatttggctcatggttctacaggctgtaagagaagcatggtatcaacatctgcttctggtgagggcctcagcctgctttcacttatggcagaaggcaaaggagagctggtgtgtgcagagaccacatggcagagacagagagagagagacagtaccagagagaggagggaaatgctaggctctttgtcaggaactaatagaatgagagaactcactcattacctcgaggactacaccaagcccttcatgagagatctgcccctatgacccaaacacttcctattgggccccacctccaacactggggatcaaatttccatgtgagatttggaggacaaacatatccaaactatagcattctgcccctggcctcccaaatctcatgcccttctcacattgcagattataatcattccatcccaatggtcctcaaaagtcttaatttgttccagcatcagctaaaaagtccaaagtctcatctcagtctcaatgcaagttccttacagctgtgagcctataaaaccaaaaacaagatatttatttctaagatacaatggttatataggcattgggtaaacatttccattctgaaagggataaatcagcctaatgagaggggtaccaagccccatgcaagtccaaaacccagcattaaagctccaaaatgatctcccttgactctgtttcccccatcctgggcacactagtgtgagaaatggggtcccgagcccttgggcagccctgcctccagggctttgctgggtacagcccacgtggctgttctcatgaattagagtatggtgcctgcagcttttccagataggagttgcttgatgctggtggctctgtaattctagggtccctgcaacacccccaattccactaggcagtgcccttgttggggactttgtgtaggagttccaacctcacatttccactcagcattgccttagtagagtcgctccacagggcagcgcccctgtggcaggcttctgcctggtaatccaggctttccaatacattgtctgccatttttccctctgtaattgataaataccttgtggggagatctttctcagacttttactcactgattttagcatgtactggtggagcttgcctgcagtagttattattgtggtgtttgcctaatggtaattttgtattttcttcattccatctatatgtatttattaattgatatttttctgtgtggaagatctaccccttctccccaatttatttgtgtcttcagttatttatttatatcagtatggactcatggatgttttgagttataatccagttctatctttatatattttgttgctcaaattgctctataaagctgttatatttttgaactgacagaaatgaattttcttaaaataaaaaagctcattcttaggtacttattttactgaaaaatgagaggtgagacattttggttttgcactgtagctagtatgctgataatgctttgtttctgttactgcttctgatagcttttagtttcttgatttgtatttgtcaggttgtcctatctctaatcttcacttagacggcttatattttatcctgctgagatggaggtgatggcctatctgcacagggtggaaattgcctttctaatatgcttttgagatctcattatgtgatataagttttattaattttacaattattcctgcagacttatggataataggagtgttttatgaagtggaaaaattttaaacaatgaagtctaaataccagtggagcttcttatccacatttttagagaaaaattagtaaaatacttggctatctgtaactggtttccttgtgcttctaattttagcaaagtaatgatgcgtaaagagaattttaataaccatgatgacttgtatttttataattaaatgtctgacagtaacagtggtgtccagaatcacatttttttctgaatattctgagctgagattatattttatttctgcctctttgtgttttctagataggttcttaaaataggtttaaattatcttttgaggagaagtgaaaacttgaaagaatatcatttttaaatcatggaaactatacattgaggtagattttcatatatggtttgttgaatcagttgcattacttttacaaccatacctggtaaattaaatcatgatggctgtgatcctgaataaattaacccagataagttagcattaatgtactcttatgtaaagtaaactaattcggtatgatttattcttttttttgaaagttgaggaattggccttcaatgtttgtttcaaatttgaatgcctagaccatcaaacaagtataggttaaatagctaaatacatcacttgtagaatgttggtttaaattattattaatttatttttactccaattgagaaagataaaatattggttatttataaaatatctctttcattactgtcgcttcacattaatccatctgaaggaaaagcgaaatttgtttcattgctgtgggaatttctcattttacttaataatctcattataatatcggtatctcaggctcttagagttagaaggtcatttatgttaagtttcttgtaattaagaaatctcatctttagcatccaagacagatatgcagcctctgaacactgtagtgttgggaatcttatccctctcagggtagtttgtttcactgttttatattctctggttctcagaaaactttttatttgagttacaagttccttgatgaaagagattattttattcatgtgtatatcactgacactgacttgcacataatacagtaggtaattaatgaatagttaaattatattgagtagccatctactttctctaactttccacattgattttaatcttatggatcaatgaaggactgtgttcttttctatttgatagactttcatatgcgaatgtcaccgttgtgtctgtctttagtcattacttctctagacactgtgagaatttgtagatctctaaccatactggtcatcttggtttattatccactcttaaaatacgatgccaaggttggaattcagcccttagattagatcaagtagagtgagacaactaatggtggattaatgcccccttttatgtaaagatactaggctaaggacagaaataaagaaaaatatgaattaggaagccatttctcagactccagaacattgtagtgtcagttttgtctgttgactgttaaattatattttctagctgataatagggtaaaattggtaatgctgccaaatcatggttgatgctactttggatgtttaataatatcttgcatttaactcttggcagtttacttaatgctttcacatatatgatcatatgtaatcctcaaggtaagtattattattctcattttgcaggtggaaaaaaataatttccccaaagttatataactagtgaagtagcagaatcctggtctttctgtttccaccacttttccaactctgccatacctgtgtttccagaaggtctcatttgaatatttctcttgatttgaagggatatatgcttatcatgttgacatttattatttacccctttcatctgtttctttcttttttttcttcttttttaaatttttttaaattatactttaagttttagggtacatgtgcacattgtgcaggttagttacatatgtatacatgtgccatgctggtgcgctgcacccactaactcgtcatttagcattaggtatatctcccaatgctatccctcccccctccccccaccccacaacagtccccagagtgtgatattccccttcctgtgtccatgtgatctcattgttcaattcccacctatgagtgagaatatgcggtgtttggttttttgttcttgcgatagtttactgagaatgatgatttccaatttcatccatgtccctacaaaggacatgaactcatcattttttatggctgcatagtattccatggtgtatatgtgccacattttcttaatccagtctatcattgttggacatttgggttggttccaagtctttgctattgtgaataatgccacaataaacatatgtgtgcatgtgtcttcatagcagcaagatttatattcctttgggtatatacctagtaatgggatggctgggtcaaatggtatttctagttctagatccctgaggaatcgccacactgacttccacaagggttgaactagttacagtcccaccaacagtgtaaaagtgttcctatttccccacatcctctccagcacctgttgtttcctgacttttcaatgattgccattctaactggtgtgagatggtatctcattgtggttttgatttgcatttctctgatggccagtgatgatgagcattttttcatgtgttttttggctgcataaatgtcttctaattcatgcacgtattacagttaccacagtcaatgttactcttccgtctatattagctaccttttatttatttaatttgaccaaaaaaaaccagattgtacagattcttctcaatcaccaaggaagaactaactttaaaagctactttcaaataaaaataaagaaaactgtctttgcatctaaacttggtgtaccactatgttttggaactttggaggtaaattgtgatttataaggcaagttttgattcttcctgatggcttttgcttccttatgtttctgcagcctcgatgtacttgattttgataaaactgttgtttggagtcattaaaccccttgttgttgtttgttgtgtatagcttggcatggtggaatggattgaacctcctaaacgagaacgcaaagcaaactacgcagtggatgcctactttagagaggctttgcgtgtcagcgagccaaagattccaaaggtaaaactgtacaaggccagtttttatgtcctaaagtagatttctgttgcaacatgatctatgggtcagatttacttgtatcattgccaaatcatagtctctaaaatataacagtacaaaaaagtatctgatttggcccagccatataaatggattttattgtatttattgttccatatatcacagaaatagtaaaagataagtaagtttacttcatgtactgaaaagaagtatatataatacattttcctccctcataggctccacggcctccaaaacagccaaatgttcaggattttcaatttttcccaccacgcttatttgagctcctggaaaaggaaattctttattatcggaagacaataggctataaggtattttttccattttttaagattaatataatataatctttaaaaataatttaatctgttaatctagactagaaggtgttgcattttaatttgagagaatgtgacagcaaatcacaacagtgatgtttttaaaaccaaagaggaagtttaactagatgtaaaacatctaaccactgaatcaccagtacagtcatcactaaatgagattaatgaagaattatgcaatattttgaaatagtaataacattatttttataatgccagtgtttgaatagttaaagaatatgtagagagaacaataggtatgcggttaaaagcgaatgttaatatatgataggaaatttttgatcatttccttaataggtccaagaaatagtatttctgtctttattgcctatacgttgctgaaagccttgctggtggttagtagattgtagtcacttaggtgttaaagataatgataaacatgatagtgaattatacaattttaaaatgatcttttggtatttggaattcttatttatataggtagatagaatcctagttttcatgagtgaaatttaatatttgtcacactaaatctgtcatattgggagagtaagcataccaggtaatttctgtatgttgaaattgacttcctagtgaatggagagagatgaccaaaggtataataatcactaacattaaaaaattataaaatactggccgggtgcagtggctcatgcctgtaatcccagcactttgggaggccgaggcagaaggatcagttgaggtcaggagtatgagaccagccttgccaacatggcaaaaccccgtctctactaaaaatgcaaaaattagctgggtgcggtggcaagcgcctataatcccagctactcgggaggctgaggcaggagaatcgcttgatcctgggaggtgaaggttgcagtgagctgagatcgcgccactgcactccagcctgggcgacagagggagactctgtcccaaaaataaaataaaataaaataaaataaaataaaataaaataaaataaaataaaataaaatattaacactattttaattttatgaagtgttctgttttatgaattaacagctgtgttttaaattttattttgtaaacctttgtcacaactggaactgtgacccattattttaattagtagctggaatgtgcctagaaaagctccatgtatataagatacttatatcttaactcattatattttggaactagagtagatctctagggtgaacattcatataagacataaaactagtttcaaagaaagtgaaaacagtgatacaccagaagaaacaggtaagttataggttcaaatataaaataaaaataggaaaattaatgataattattaacaataattattaattgtttaataatgaagtagttatcttgtgaggtaaacaaatacatatcatctcattaaggtttataataatttgaggtttagaatattattttctgttacgttcattaactgttgttagtgagacttgaaaggagaattaattgaaatgttagacctcagtaataaatcaaatatttgcatagaacattttataatttacaaagtgctttaacacatactgaggtcgttgattcctaacaacctcatgaagtaggtgttattatcatctccatttaataggtgaggaaactgaagttcagagaggttaaatgaccttgttcaagatcatggaactaacagggttgccatgggtcctggtctcacaaccagtttctcagtattcagatgttctattcgttccgctcagacgttctgggctctttctgcatgcgatgtaaccctgcttctttctgcagtcctaaataaggactgtgtttacaatggtgtggcatgacatttgggagttgggccaagtggtagtcaagtagcaacaattaaaaaaatcatctctgatataactttatgctccttctttggagatactgaaattttgttccccatgataatttacagtgaccaccacattctggccaccggtctggtttgaatataaacagtgcctttcattacaggcagtttgtggttaggggtgaagtcttacagtgactctttgggtggtggccagctggaaggagatggagaagagaggaaacctcagaagatggaggaatgaagggacagctgttaagggtggtagaaaggaaggggaggaggagaggtataagaatagaggaaagggatgaatagggagaggggagatggcatggaattcgtgctattgcaccttattgtttgctcttcctcacttccctgaaagaagcaagaggagagggaaaaagagtaaaaggaggacctttttttaaagtgtaatacctatttattgagcaatcctttgtgccaggtactgggccaagtacttgggataaagcagtgaataagacaaagtctttcatctcatggagcttacattctaatagaggagataggcattagatactacaatgtaatggtggtggcatttgtgtggttctgtgcttacaaggggtgctaatgagggagtataacatgggtatctcatgtggactgggagatcagggaagtgttccctaaggaaatgtcatttaagctgagtttccagagatgtgaatgagctaagtgaagtgtgggagagaaaagctgaggcaggtggcacctcatatgcaaaggtcttgaggtgggaaggaggatgactccttttgggagctttaagaaagccagtgttgttagggactggtgagacacagggtgacttgagatgaggctggtgagtgggtagagtcaaatcatatggagggctttgtaggtcatattaatgaggttgaactttagctttagagtaaaggaaacccactgagatgtttttaaggcagggaggtgggtgggtgggtggtaaagtaatactaatagcagatacttagtccttacatgtgttacttattgttcaagttatttgtaaatgttagctcattatcctcctaacagcctttgaactacatccttattttacagatgaggaaactgaagcatagagaggttgagtcatttgccctgaataatttgctcagggtcatacaacttataaatggtaaattatgatcagatttacaatttttttttgagacagagtctcactttgtcaccaggctggagtgcagtggcgtgatcttggctcactgtaacctctgcctcccgggttcaagggattgattctcctgcctcagcctcccaagtagctgggactacaggtgcatgccactacgcccagctaatttttgtatttttagtagagatggggttttaccatgttggccaggatggtctggatttcttgatctcttgacctacctgccttggcctcccaaagtgctgggattacaggtgtgagccgccacgcccagcccagatttacatttttaaaagatcactttggctgcgatgcagagaatggcaggtttatctagggaaaccagccaggaggctgttgaagtatcaaaatgagagaagatggtggccacttggactgcagtggtggtggtggaaggagaaccaatcccctactactctactcctagccttggactctcttcagccgtatcctagattgcttctgtattgtcttaagacttgccttgatcctccttatgcatgcttagctgaggatttaggtgacaaataagaatacattctggatatttgttctttctggaccttgtctcttccattctttactaggaactatggacctgagctaaggtgggttctttaattgggtggttttttgtttgagttcagagaatagacagatcagcaggcatgttaatcatcttaaaaagctcccttttaaggatgatgtgatatataaccgttagacatatcttctcaaggcatagctagcattgctttatttcccccttgcaccttcagaaaactcatcagggccacaaagtaaatagagcactagtttatcctcaaatgaacaaaacaaaattgctttagtggagttacctggtattctgtgtacacagattctcaaaaagggactctttcccccttttctgcctaaaggattgttagccaaggggagataggtgatgcccatagctgggggcactgtggttcatggttacgttttatctatgttgagtctccaaaggcttattctgttgtgatttggagtggggctagtgaagggcccacaagttttgaagcagttggtagagagtggtttccttgtacttcctggttatttgcatttttattttctgtttttctccccctttccctccctcatattcagcacaaggtcacagcaatattgctgataataagatctggagttaaagagttttgttttatttgaaggtgagagaagtatttgtttcgccctaaccacgtggtggacagcagtacataatgtgcccattcttgctgctatctaagctttgaccttaggcatattcaaaagctgcattgctctttcgacttaaaggagttgttatttaatgcatgcaatcacttggtcactaaaacctttatattggaagaggacgacttaattgaaatttcaattacagcataaaaaatccagaatatctggacgttccattgagtctaaaacctggaatgcaagagttttgccacattcgaagctaaagaaagctatagaacattctaacatttatccccaataaaaaattctttagggacaaatataaacatttgacaaatggaggaagttccataatctttgtgagttttggtaatgtgtcattgtgggccacctactttttcagtggtagaactaaaataatggtgagctgatttcaggttactgcttttattttgtgtggtgtcacatttaattcagtactccatatttcctatgcaatgcttgctaaactcctcctaagaaacaaggccaaaaaaagtttttcactacttcatggaatacatttcttaatcacaaattccttagcatctgagtagaaatccaaataataattgagatttttactttagaaagataacattttatatattgtgttgctggagatcataatgagacatagagtatgaggactttaaatacctcctgggtatctgttcagtactattggtctgtaatttgtctgcttaattctttttttttcttttgagacggagtctcactctcttgctgaggctggagtgcagtggcactgtgtcagctcactgcaacctccatctcctgggttcaagcaattctccttccttagcctcccgagtagctgggattacaggtacccattaccacgcccggctagtttttatatttttaggagagacggggtttcatcatgttggccaggctggtcttgaactcctgacctcaggtgatccacccgccttgacctcccaaagtgctgggattacaagtgtgagccaccgtgcctggcctatctgcttaattcataatgtagtactttgaaatcattccaggaagcttaatgctgatacgaacctcatgaggtaaaaaaaaaaaaatgtatgtcttattaaaatgatgactattaaggtttttttttataggaggtgtattagtctgttttcacactgctgatgaggacatacccgggactgggtaatttataaagaaaagagatttaattgactcacagttccacatgactcgggggcctcacaatcatggtggaaggcaaggaggagcaagtcaggtcctccatgttagaagggaagagagaacttgtgcaggggaattcctctttgtaacaccatcagatctcatgagaattattcactatcacgagaacagcatgggaaagacctgcccccatgattcaattacctctcactgggtccttcccatgacacatgggaattgtgggagctacaatttaagatgaaatttgggtggggacacagccaaaccatatcaggagggagatacaggaatttagaaactttgagccttttctaattctaaacattttagcagctatttgagtaatttctagaattaaaatagcaaacatagctttcatgaagtcattcttgttttgctatgttaattaatatgaccactggatatagaataaattgcagtggattctaaaatctaatggttttataaaatattctgattttgcttttattagaagttgaaaggggaagtttttagtatggggatgtctgcatgggaataaacagttttattttattttatgtgggtatatttattttctgtcatgaattggatgtttataaaatattttcattttgttaaaaatatggtttgttggacatggaaattttgaaaatgtttaagagaaggatatcttaagatcaaagaggtttctttcaattaaaattaaaatttgaaaccaaagtaatttcacataccagcaatttaaggggtctattaacttttaaaactgtatctgtacttttaaaaaaacattatgaaggatttttaaaaatacaaaaatgttgaaataattgtacagtgaacacccatatataccccacatatgtttgacaatttacatcttatggtatttgctttttcaccgatttttccatttctctggccctctatcatacggatatttatcttattattatgcatctcaaagttgcagacataagtacattttacccagaaacacttcaacatgcatgtcattatccagagtcatattttgtttatgattttttaaagtaacatttacatagagtgaaatatataaaccttaagtgtaccattcaatgttttttcacaagtgcatacacttatgtaactcgaactcctcctataaagatatagaccatttctgtcaccccagaaagtgccttttcccagtgaccatatgcactcctcagaggcaaccactgttctgatctttccctccatagattaggtttttaaatttttgttctagaatttcacataaatggaatcatacaatatgtataaggcttgtttcacttagcataatgttttagagattcagccatgttgtcccatgtatctatgtggctccttccttttgattgtggaacacctattccattgtatggataggccacagtttgcttattcattctcttgatggtcatctgggctgttttctggcttttggctatgatgagtaaagctgctgtgaacaatcttgtcaaagtctttgtatagatacattttcctttctttgggtaaatacttaggaatggaattgctggtatgcctgtaattttaacattgggtttagctactgaagagaagttgtttttaatcatgctatgactgggctacatttcattttaaatgtacaccttttccatttccatttgccaccatcctagtccagatgatcatgcgtcatttctagattatgatagtagagcaggttctcttacctgttagtcgctgccccacttcagtccattcagcaaaaggcttccgggtgaaaacactacattttgacactttactcccttgttcaaaagtctgcagcaccttctgtgtagtgtcaagaccctgtaaatctgtctctacccttccttgtttcttatctcttttcaacataaaccccatatgcgccttcctgcacatttctgccttcatgcttttgctcatacccctagcctagaatattctttcttccttctccatctccctagatccttagagttcttaaggtacagctcataattccacaactagtttgtgagctccttgtgggcaaggaccatatctaatataggtagagtttccctcattcaaaaatctgaaatctgacatgttccaaaatccaaaactttttgagctctgacattgcgtccaaaggaaatgctgctcattggagcattttttggatttcggattctcaagttagaaatgctcaacagataagtataatgcaaatattccaaaacccccaaaaatctgaaatctgaaacacttctggtctgaaacatttgggataagggataaaacctatgcttatattccaatcaatacttatcatagttctacaaacataatagacatttagtcaatacctgctaatttgattgcctgatactgatgattacaagtgaatctaatttctcagtatttctttttaatgctcagttaggttttatacctgaagaactattgtacttaatagttaatttttaagttacttttaagttacaatgatatagttccaaactctatgaaatacatataacaatgagaaaaatgcactctaatgtgtattataattacagggtagtaaaaccatgactacctgatgcccctagggaatgagtcatgtgtgcatttcaagcagtggaaggcttactgccagcccttttattttcatgtttaatggaatgctataaagtgtagtacacatgttatgtacttgccctcttaaatcaatgtgcttccttgtagctgcagatgcacatagcgatggtatcaggctttaggctgagagacttcatttgttcctccatacacacagtatagttcagccccatactgctgaaccacattggttatatatgctcactgtgatacactgaggctctgcaggctacagttttgagatacaggtgacaacttgctttcttggagagctgagcttctgtccttatcttttgaactcaagttctcttctcagttttcactgtatttgcagttctgtacccaaaacaccatatatgatttctgttggtcactgctgttgtagtcttttcctccttgaccactggtcctatcatagctatttgtgtgctctactatacccttccctcttatattctctgtttcctcttttttcttcattatcctgttaactttttccaaactttccattttatgtaaaaatgctctctccccttacataccttggcaggcaataaaagcactcctttctttttgcatgttgaactgatcagactgttggatgtaatgttcaggtgcgttgccacttctccattctgctctgtgttgccaggggaatatggattcttttttgttttttaccactaaactttttgtttgttctgtatattacaatagtataagggtagactttgttccagggtataatcatatctgaaatctaatgtggcatttgccagtgagttttaactatggaatatcatgtggcacaagaatggtttttacttcaataggatcatggtagcagaaatgtggagaggaccgtgtgtcattctggctatgattttatattgtttactcttgaaataactctaaagattgatatgtgtatatacagccttagtaattaatttttctcatcagtttactcttagtttatctcttgatttataggttccaaggaatcctgatatcccaaatccagctctggctcaaagagaagagcaaaaaaagattgatggagctgaacctcttacaccagaagagactgaagaaaaggaaaaacttctcacacaagtaaaatattttcaatggctgtaatacttacagtcaatcaatagaaaaaaagaaaatatagatcacactttttattgtatgggcctagtatcctagtgtgacacaccaacaaaactcagggctattttgtaaacatgtttagaccaaatctccttatttttaaaaattgatcttatagaatatgcccttttggaaatagtggatagtatgtatatgcaaaatataagtgtcaagtattagcaatttgacatacattttgccaattataataaggtcagtgaatccacatttgaattctgatagacagtagttattaacatattcttttttgttttttgagacagtctcgctctgtcacccaggccggagtgcagtggtgcgatctgagctcactgtatcctccacctcccaggttcaagtgattctcctgcccaagcctcccgagtagctgggattacaggcacccaccaccgtgcctggctaatttttgtgtttttagtagagatggggttttgccatgttggccaggctggtctcaaactcctgacctcaagtgatccacccacctcggcctcccaaagtgcaactgatactacaggtgtgagtcaccgtgccaagcctgttattaacatattcttgaaaatttaaatttcttttgtttatagatgtgaattgtctcctgaagttatattctactaattttttattaatggaataatttcataattttcaaaattctttttatctttttttataattttcatacaatgatgagagatttctgaagcttttattattattattattatttaaggtgatcattgtataacaattattaaattaggaaggtttccatttgaacaaaatattaatgcttttaagtcattattgctatcatgagttttacgagtgttctacttctaaaataaactatagaagataaaaatttcagcatagaaggcttgcaaaataaacaaaatgtgtaccgtaggacattactttagtatagagggttgccagcaagatttatttattcaacaaattttgaacaatgtgcgatgcatagtagtaggtaattctccacgttaattattgaaagatagtttttatatttgtatattatttattatataggttttttttgctataacgtaattttattgtatggattttcacaaattacattcataagtttttgagccaaatgcctggaagtaataaagtttagtttgaaaatataatggcagatggctgaatattagaacttaccacagaataaaataaaacatttaaatattcatgttctattttcaaaatgtatttcctgaatgtaaaagtaaagttatggctttagaatgctacatgacttggagtatattgtgaatgtacggtataacatgaatatacagtctcaactgagataatattttagtttgtaattagaaatataatcagttttctgcttctcctagtatatgaattcatttttgtccttctctgctgccttaaataattaatctttttcaaaaaaccatggcagtacgtaggaacaaaatgtggggtcatctgaaatctttatcaactaaaagccagggatagagttttgcagtgtctggagtatcacatttatgtgagttggggctcgaggagtggaagacaaattcttggtcttgtgacttcacagacatgctaataatgccaagggaatttaaaacactggctaaagtgttttatgttttagtaaagaaattgagtggctccaataacgttctgcttgtagaagttctatttatgaacataatttagaacagaaattatttattcacactagttcagaatgatgtaaagagctacaatttttttttgcattatcttttggttattcctcagtgttcttttgatttagtgcatccacatttctctcttttaatttatgtaggaacagatctgtgaaaaaaatcattgaagtactagaatatcacgacttcagcatttatattagcatttttattttcatgcatttgtattttaatgtaggcatctataaaatatgaaattaaaaactacagatcttcgaactatgtatcaacattctctttgtaatagaaaagcagttatttctataacaactctcactcaacttttgattccaacataaaatatgtgcaattttataaggagaaacattttaagtcttttaaagtgttttttaatgtatcattgtatagaagtaaatagggcaataaatggatttattaatttaacctctattgataatgcttaactttttgttcacagggtttcacaaactggactaaacgagattttaaccagtttattaaagctaatgagaaatatggaagagatgacattgataacatagctcgagaggtagagggcaaatcccctgaggaggtcatggagtattcaggtttgtatataatttgaaacatggtgttgtattttaacgttattcatttatttagcatcaatttaattgtacctttgttcagagatgttttaaacttttatgaataagacatagatgagagtataaactataattgtatttctatgaaaaggttataagaaaggttataagatttatcctaacaaactgactgctattgtctctatcacctagctaaaagaggcaaataaagctctgataaaacaagggtggctcttggataagcattgacaaaattagtttcccaccttcccacctctggaatttggtcttctggttcagttctgagattcacattcagtggattgaattcgtgcctttctttctaggtcgtccttaaagtagagagttcctgtcaggcccatttagatgctcaaacaccctcagagttccaccctattccagagagttcctgtgggtcccattaacttggggctagcgggcgtagagctgaaaagattgctttaatcaatctgttaactggtcctcaaatcctctccctctcttactcacctgtgttgttgagctcgaccagaatcagtttagctgctgaagcatatggattttttttacacttactggtttattataaagggtattgtaaaggatacagatgaagcgtgtagggcaaagtatgggccaagagggcgcagcgctttggtgccctccctgggcgaaacctcttcgtgtttagctatccagaaatcttattaaaaataggtaaatatgtctagcaagttttctatatgtagtacatgggacttttctaacttccaaataggttcagctcttaaacttatcatttgaaacaagatgtttagaatctagagcattttttgtcattgaaacaatggcaaagtaggtttaagtttacaaagtaggtttaagtttctatgatagcccctgccccaaatctatttaaccctaccactgaaattctgtttttgcaatagtaggaaagaaacattacagtaccaataaatatactaaagattaataatagctaggaacagcttttaatttatctagcatgctagtgcttgaagaaatccagatttaattagagagatttttttttcttctggaaatctaaaagagtcttctgggggacttcagaggtcagttgtattgagtttttattacatataatataacattaagtatatgaacttccttttccttcataccagcatgatattactattactctgaacatttagcacataaatttagggcatttggaggcttaggggaaaaaatagattgaagagagaaattttagcatcaagagttgaatgaaaagaatgtaaaagggtatgtgcagagagatttttaagaagaatttttttcagaagataggcagggagataacatcggtgtatgtgaagttgcaagaaaaaaatgtgatttaaaaagatgatcctgtcagactttctttcaaatttgacaccaagccaggtggcatgactagctcaggactatttaattgctgcctgccaggttgggggccatgtcacagggtgaggagattgcaatgagtttgttgtagttggttacagtaagagaagaaatgtgtacaattgaccacccatgaatatacagtatcctgtacatagcaagtgtttaaatatttgttgaatgaatatgtgagtgaatgagtaaatgaacacaggtgcttataaaaatcagagtgctcacatacctttcttgataggctctaaaaatgaaaagcttgaggatgtggagtatgtcattaaaaggcctttcattgaagtcatgtgacatattaatacagccagattatttggctcatctataaaatttggttgagtgacttggaatgtttttcagtgtgtatgcaattaaaatcccaatgaggtttttttttttttttttatgagaaaagggtattccaagtaagtttaaaaacacactactggtcattggaaataccgtaagatgattagtgagtgattccaaaagcaaatgacaatttcaagagaaatggctgctccatagaaaaaaatttgaacaacctgttcataatagcttgggttttttgtttatttgtttgtttttgagatggagtctcacttaatcgcccaggctggagtgcagtggcgcgatctcggctcactgcaacctccactttccgggttcaagcaattctcccgcctcagcttcccgagtagctgcgattacaggcacgcaccaccatgtgcagctaatttttgtatttttagtagagatgaggtttcaccatgttggccaggctggtctcaaactcccaacctcaggcaatctgcccacctcagcctcccaaagtgctgggattacagtgtgagccactgtgcctggcccataattgttttcgcatgctaggaagctatattcactgtttatatattactctctcctgtgtcactttatgtgtttggtcccttttctatcatgtttgagtaaaaagcctagcttaaatcagtatctgcatcatcttttgaaatcctagtcatttgggatggatcgtaagactccgtactatttcatgaaggaaaattgctaacctaaaaccttgttttgaggtcttatttttaagtgaaaagttagtagtatttaataatttaacatattatatatataagattaatctgaatcttaattttaagaagtacaagctcattgtattctttcctattaattccttattctacaattccttggatttatttgcttaaatgataggattttaaagaaataactctgtttttcagctgtattttgggaacgttgcaatgaattacaggacattgagaaaattatggctcaaattgaacgtggagaagcaagaattcaacgaaggatcagtatcaagaaagccctggatgccaaagtactatgttttatgtcaaattattattagatcgttttaattgaaatagtggtcagctttgacttcttactgcacattcaattaaaagcactattttgtttaaatacacagattgcaagatacaaggctccatttcatcagttgcgcattcagtatggaaccagcaaaggaaagaactatactgaggaagaagatagattcttgatttgtatgttacacaaaatgggctttgatagagaaaatgtatatgaagaattaagacagtgtgtacgaaatgctccccagtttagatttgactggtttatcaagtctaggactgccatggtatgtattcctttcttaccgatttcctccaactttttattttgaaaaatttcagatgccatatatccttcacctagattctccaattaacattttgacacattggcgctctctctttctctctctctgtgtgtatgtgtatacatacgtagcacctatatatacgtgcagaatctatattttgtattaaaaaatacggggacatctatattctatattctgaaatgcgtatctatattttataagtatacttaactatatttatgaaccatttgaaaattacagacaatgtgagtgttcatctctaaatacttaagcatgtatctcctaagaataatgacattttcttacataaccacaatcccacctgaaaacattgattcagtaatgtcatttagtatacagtctatgtataagcttttccagttgcccccaaaatgccccctttatagctgttttttttaaaattgatgatcctgcaagtttcacacattacatttcgttgttgggtctctttaatctcttttaatccacaaccttttggttttcgtgatcatgactttttaaaggtgtccaggctagttgtcttgtagaatgtcccacattgtggatttacctcattactcattgtaagattcaggttcaacgtatttggcaagagtgctgtggaagtgatgttatgtattttttattgcatcccatcagaaggcacattatgtcatgttgtcacactgttggtgatgctaagtttggtcacttgttaatgtgatgatcttcagagctctccgctttagagttatgttttcccctttgtaattaagcaggttatgcttgagactatgcgaatgacttaaagatggacttttaatgaaaaggagttgttgcctaagttgagttttttattaggaaacagaatatttaagttgaagagatattttattttagcttatgtgatttcctccattactttctaatgtgaattgtgttcctattctagtcctacttagcagtggtgttcatgatgattttgaaatacatgcaacacatttttaatgttggcattgttaatcttttgtcagccaaggtaattaagacaaaatagatttatgcagcctaaaaattaaaagcaaccagaaactaacaatgcaaacaatgtttttgtgactagtcataaaataggatacatttttcttagctgctacctatcataaatatctttttgtccaaaagttgactgagtgtgaaacaatgcttaatattttgcttgactcactttatattttcagttcaagttgaataaaaggaaaggaaaaatctgggttactgtagtgaagacattaattttggcagatgctttagaagatcacatatttgttaaaactttaacacaaatttagagtgtgtggagtatgtccatcaaatttatgaatggcgtatgcttggagagctagcaaatattttagaccaagccatgatccagaaggagctagagtagttggaatgatggatcagttgaatccagcaacacaacatttatttattttatttatttttgtatgtatgtaggtatttatttattttgagatggagtttcactctttgtcacccaggctggagtgcagtggtgcagtcttggctcactgcaacctccacctcccgggttcaagcaattctcatgtctcagcctcccgagtagctggtattacaggcacctgcaccacgcccggctaacttttgtatttttagtagagatggggtttcaccatgttggccaggctggtctcgaactcctgatctcatgtgatccacctgcctcagcctcccaaagtgctgggattataggcgtgaaccaccgcgcccagcaaacatgacatttaatagggataaatgtaaagtgctatacttgtacaaaagaatatgaaaagatatatatgttagcaaggtacagtaggaagaattaagaaaagaataaaaaagataaagaggtaatctgtagcttgaaggactgaggttggatatagggaagagttgttttatagagttctttggatcattgaaatagattattgaagaacaatgtagaatagcttttcattagcctttgaaagtggaattctattttgactctctgaagacattggcagtaagttacttggccttttaaggtcccctttagcacagtgaatctatgactatgtttagcagagaactccttttaaaagccatgcaggataaatcttttagccatttggggttttatacatgtaatgatttaatttagagcaccactaacagcttgtagaagacaaatgcctacctgcatttgtcagttaatcatgttttagaatatacatacccttttctgtgatagaacagttattgaattttgagtttttatttcagtgatattttgctaattttttaaaaggttgagagcttaatgctgttttcagtttctggaatcattaaaccagtaggacgaaacacattcaaagtgcaaggaaaatcttaacactatttataatatgaacacgactgtggaactacataaccttattttattttctaagaaaaaaatccagtataatattatcaaccactagatgtctctgaactcccttgtaaaaaatctgtttttcttccatcttctttttacaaaacatttacctctgtactctttctttaccgagaaatgtaaatctcaattatgttttccaaaaagcacatattaactatttaaatgatcataaaatgaaatctttttctgttaaaaatgaagacatttctgtcttcaattaccttctagaaagtggaatttattatttctgaacaatcttcagaaacatgcagtagtttattttatatttaaatattttaattgaaaagttttatttattactttttctatcgtattaaatttttatttcccttctagttaatggataatttttgcttataataatttttgcttataattctggatttagagtataaataatgtattttaaaacacacatacatttggaactttttagaatatttcatgataatttcaacaattaggaaattatagaaatggattgatggttcttgatgatcttctttccccctttcatttttagtaactcttctgtatagtgaatcacattcacaatctaggaagagaaactgccccatttgaaagaggcacttgtgatttctgaaatacaaagaagttgtttcattgaaaaatcccatcttagaactacagagaatgtaatttgattcattatgtgagtgtgtcactgtgttcaaatgaaaatcttactaatgattgaacttagcttactaaagatacctttaaaaacgatctggcttaaagatgactcttttctttctcagagacatgaatagtgtgaaatgcatcttataaaaagtagaaaccttaatagttatatttgattcagagatctcaaagtactgaattcatggctcctgacttaactaacagtcataaaggcacgaacttccgcttctaaatatgcctcactttgaaagccttcagctaaaggttgcagatttctttgaggctctttttcattaaaaaatgctagctatacaaaagagaaaatgagtttcagttcaatttctctgtgctaaaaggattgtgatttctttctctgagaatttgtgtggtctttaagtaagtaatcagtctctattgaactacataaacaagtaggaaggatatgatcaacttagctttttaagctcagagcatatgaattgccctaccattttctttctaagaaaaccatcttagaatgaggtcatagtcttaggatagtcaaaaacttatcagagttaaaaggacccttatcaaataaccataagaggaagtaatactttgtatttatgtagtaccttttatataatgcttgccaatccctttaccaacattagcttaattttcttgccactccttttaggaaatgaatgtcaggagagtatctctgttcattgagtgacgactaaatgtgactgggagattctggaagaatctaagaagtccaaaagatctagcacattagtcagtttactgcaaaggacatgtggaaagagtacccaaaattcaatcagtaattccttgtaccttcttaggtccttctaagtacttaaagtagaaaaagcagaatttaactctctgaaataaggaacatttcttgatagaaccatttattgcattatttgcagggctgctttgactcttaattttagttaaaaaaaaaattcttaccttttaacctctggggagatttttccttttccagccagctcaagagcctgtgtgtgcattgcttgtggccttgtatatattagagttgaatccgagtattagtaattagtcattacaattaccatatcttttgtagtagtttcaatgcatttttctgatagcatctcagaaagagaatcacatactgtggtatacaatgtaatgaaaattgtgttattactgcttgttttcaaatcacagctttattataaatgaaagtgttttctatttaaaaggtaagaaaatgacattctccattagaattgtaggaaaaaaatactttttagaaaatattgctttagctctttattaacttccctgtttttggcttatcaggaggtattaaatgttaattagtattggttcagcacaggatattttataaattatcagtccagtcagaaatggattttctttacagatactttagaaaaatgacagtcaaattaaaaaattgccaacttgttctatagtcacagtaacacttctatttgctgcttatggagtgtagtctaggaaatttcataaggaaagacagctactcatgatttttaatttccatgttagtacttaattgtgtgataacagctaattttttttttcttggctcactgcaacctccgcctcccaggttcaagtgattctcgtgcctcaacctcccgagtagcagggattacagttgcgcatcactacgaccggctaatttttaatatttttggtagagatgggatttcaccatattggccaggctggtcttgaactcctgacctcaagtgatcctcccacctcgcggtctcccaaagtgctgggataacaggcatgagacaccgtgcccggcctaatattgatattttagagcattacattcttagtagaatatgaaaaatatgaattaatacatcattggtaaaattaataaactgtaaaatgtactgatgggttcttcttgactatagaattaaaatatttaaaaccacgtatttatgcacttaggagtttattacctcctcatgcacttaaaagactaaaatgttcttttcttattaaattttttttttgaaacagggtctttttcttgcccagctggagtgcagtggcatgatcatgggtcactgaagcctcaaattcctggactcaagcgaacctcccacctcagcctcctgagtagctaggactacaggtgcgtgccactgcacgcagctggcttttttagtttttgtgaagacggggtctcactgtgttgcccaggctggtcttgaacacctgggctcaagcaatcctcctgcctcggcctcccaaagtatcaggatcacaggcatgagccactgtgcccggccacaattattaatagttgtatttaaagagaccagcatagcacgtgacccagagtaggcgttcagtgaataaatgggcatagaactgttgtatttaagtttgcttctatcccatagactcctacagttggaccagatttggatagaatgcgagcaaattatgccagtgggttggagttcattttacttttcctttaatctacctttttctaaggttagactttatttggctatcatccctgcagcttttatttattcataagcttgaatagccagttataaatgtcatatgttttattatgcagcaatagtgttcgatttggtaccttgaactgttgtaacaatctgacatgaaatacaattaatgcactaacaggagttcatttaaggtatttattcttatgcgttatcttgtgaggaagtgataacaacattttctttttttctttttttgagacggagtcttgctctgttgccaggctggagtgcagtggcataatctcggttcactgcaacctctgcctcctgggatcaagtgattctcctgcctcagcctccccagtaggtgggactacaggcatgtgtcaccacgcccagctgatttttgtattattagtagagatgaggtttcaccatgttggcccggatgatctcgatttcttgacctcatgatctgcccgcctcagcctcctaaagtgctgggattacaggtgtgagccactgtgcccagtgatacagtattttctaaatagcaatgcttaagcagcagcagttacgtaaaagcatcataacatttaatacttgtttgtgaaatgtaggatatgtttatttgaatattaactctcatataactgcctgtgtgcattctagtatagactgccattgcttttcgttagtatgatagagattcaaaagtgactaggaacctgggaaatatactgcagaatgtataggtgaagacatcgattaaaaaagagcaaaggtgaagcaatgtccattttgttttactaagagctgtagaagaaaattctgacctcatagaactttacctacaaattcagaggcacaaatgcggagtggagttttttgtgtgcccttgctcattcagctgcttttgactttcaaccataacaggcgcagacctgtcattcagacttaggtaggcttagtgtctaggattttagtacataggaaatgtaatgtggagtctctttaatctctttcaataagtcacttcaagtctactgatgctttctctgccttttgaattgaagctttgaagctgagtattggagcaaaggatatttgaacttagtgcccaggatgattgatattcaccacacactaaggggcagtgctgctcactgcaaacattacatcatttattaaaggtagagatacatatcctagtattcaaaaattgaaacttgagtgactttgcattgaatagaatcataaaccattaaaaaagtatggagaaccaaggcaacacaattttgtttaaagtgaagctaagtctgtagcttaaaacaggacttggaaactgtggccccccacctgtttttgtgtggcctgaaagcaaagaatgacttttatattttttagtggctaaaaacatcaaaagaagaaggatattttgcaacatgtgaaaatgatacaaaattcacattctagggttcataagtaacattttcttggaaaatggacacacatttgtttatgtattgtctttggctgttttcgtgctacaatggcagagctaaatagttgtgacagagattgtgtggtctgcaaaagtcaaaaatatttgctatcaggctctttattgaaacaatataccaacacctggcttaaaagtatgtgtaagaaaggtggaaagaattataaccaagggttgatataagtgttatgcaattctttaagaaaagggttaagtgaaggatgggtgtataaagggagaggatatttagccttaaagaggggtatttggggacctaggggtgactgtgattgaggcatgggaacttccttgaaacatgtgaaagattgtcatatggaataggaaatcagcttgttctctaatgtctacaaaagttagacctacaaccaatttttggaaaccatgaggtagcaaattgtagctttgcatagaggaacatttttaacttgtctgaagttggaatagccagccttgtgaggtagtgggtactccatcattggaagaattcagacaggctgtacaactaattagcaaggacctagtagtagggattcaagcatcaacctgaatgacttaaaagttcctttctcatcttgcgagtttatgattttatgaactctgtgtcaagaaaagatttctgagtacaaagtacacttttgattacatcactcctcctgctcaaaaattgtttataagatccttttgtcaatggaattaagtaaaatttttaagttctttgttgttagttcccagtttctttacacagtcacacactggacatatttcaggttcagttccagaacactacaataaagcaaatatcacaataaagcaagtcacatgaatttgttggtttctcagtgcatataaaagttttgtctataaggcgagcaatagcattatgtctgaaaaagtacttactttaattaaaaaatactttattgcttaaaaaggttaacagtcatctgagcctttagcaagttgtaatctttttgctggtggatggtcttgcctcagtgtgaattgctgctgactgatcagggtggttgttgctgaaggttggggtggctgtggcaatttcttcagagaagacaacaatgaagtgtgccacattgattgactcctcctttcacaaaagatttatctttggcatgtgatgctgtttgatagcatgttacagtagagcttctttcaaaattggagtcagtcccctcaaatcttgccaaagctttattaactaattttatgtataattctgaatcctttgttgtcatctcaacaatgttcacagcatcttcaccaggagtagatgccttcccaagtaaccactttctttgttcatccataagaagcaactcctcatccactcaagttttatcatgaaattgcagcatttcagtcacatcttcaggctccacttctaattctagttctcttgctatttccaccacatctgcagtgacttcctccactaaagtcttgaatccctcaaagtcatccatgaggactggaatcaccttcttctaaactcttgttaatattggcattttgacttccttccataaatcacgaatgttcttaatggcatctagaacgatgaatcctttccagaaggttttcaattgactttgcccagatccatcagagtaatcactatttatggcagctatagtcttatgaaatgtatttcttaaataatatgacttgaaagtcagaattactctttgatccatgggctgtaaatgaatgttgtgttaacaggcatgaaaaacctcaatatccttatacattatctccatcagaactcttgggtggccaggtgcattgtcaaagagcaataatattttaaaaggaatctttttttgaggagtagggtctcaacatgggcttaaagtataaatacttcatactataaatagtgctgtcaccccagcctttgttgttccagttctagagctaaggtagagtggatttagcataatttttaagagccctaggattttcagaataataaatgagcgttggtttcaatttaaagtcaccagctgctttagcccctaatgaataaacctgtcatttgaagctttgaagctgggcatccgcttttcctctctagttatgaaagtcctagatggcatcttcttctaatattagggtattttgtctccattgaaaattcgttggttagtgtggccaccctcatcaattatcttagctagatttttctggataacttgctgcagcttctccatcagcacttgctgtttcaccttgcacttttatgttatggaaacagcatctttctataaacttcatgaaccaacctccaccaactttaaacttttcttctgcaccttccttacctctctcagccttcatagaattgaagagttaggatcttgctctggatgaggctttggcttaagggaatgttgtggctggtttgatctgtccagaccactaaaactttctccatatcagcaataaggctgtttggctttcttatcacttgtgtgttcagtggagtagcactttttttttttaaattatactttaagttctgggatacatgtgcagaatgtgcaggtttgttacataggtatacacgtgccatggtggtttgctgcacccatcaatccagcatctacattaggtatttctcctaatgctatccctcccctagtcccccacccccccaacaggccccagtgtgtgatgttcccttccttgtgtccatgtgttctcattgttcaactcccacttatgagtgagaacatgcagtgtttggttttctgttcctgtgttagtttgctgagaatgatggtttccagcttcatctatgtccctgcaaaggccatgaactcatcctttttatgactgcgtagtattccatgggggtatatgtgccacattttctttatccagtctatcattgatgggcatttgggttggttccaagtctttgctattgtgaaaagtgctgcaataaacatacatgtgcatgtgtctttagagtagaatgatttataatcctttgggtacatactcagtaatgggattgctgggttcaatggtatttctggttctagatctttgaggaattgccacactgtcttccacaatggttgaactaatttacactcccaccaacagtgtaaaagcgttcctatttctccacatcctctccagcatctgttgtttcctgactttttaatgatcgccaccctaactggtgtgagatggtgtttcattgtggttttgatttgcatttctgtaatgaccagtgatgatgagctctttttcattatgtttgttagccgcataaatgtcttcttttgaaaagtgtctgttcatggggggagggatagcattaggagatatacctaatgtaaatgacgagttaatgggtgcagcacaccaacatggcacatgtatacatatgtaacaaatctgcatgttgtgcacatgtaccctagaacttaaagtataataataataataaaaagtgtctgttcatatccttcgcccactttttaatggggttgtttgggtttttttcttgtaaatttgtttaagttgtagattctggatattagccctttgtcagatggatagattgcaaagattttctcccattctgtaggttgcctgtttactctgatgatagtttcttttgctgtgtagaagctctttagtttaattagatctcatttgtcaattttggcttttgttgccattgcttttggtgttttactcacgaagtctttgcccaagcctgtgtcctgaatggtattgcctaggttttcttgtaaggtttttatggttttaggtcttacgtgtaagtctttaatccatcttgaattaatttttgtataaggtgtaaggaaggggtccagtttcagttttctgcatatggctagccagttttcccagcaccatttattaaatagggaatcctttccccattgcttgtttttgtcaggtttgtcaaagatcagatggttgtagatgtgtggtgttatttctgaggcttctgttctgttccattggtctatatatctgttttggtaccaatatcatgctgttttggttactgtagccttgtagtatagtttgaagtcaggtagcgtgatgcctccagctttgttctttttgtttaggattgtcttggctatacgggctcttttttggttccatatgaaatttaaagtagttttttctaattctgtgaagaaagtcaatggtagcttgatggggatagcatttaatctataaattactttgggcagtatggccattttcacgatatagattcttcctatccatgagcatggaatgtttttctatttgtttgtgtcctctcttattttcttgaggagtggtttgtagttcttcttgaagaggtccttcacatcccttgtaagttgcattcctaggtgttttattctcctggtagcaattgtgagttggagttcactcatgatttggctctctgtctattattggtttataggaatgcttgtgatttttgcacatagattttgtatcctgagactttgctgaagttgcttatcagcttaaggagattttgggctgagacgatggagttttataaatgtacaatcatgtcatctgcaaacagacaatttgacttcctttcttcctatttgaataccgtttatttctttctcttgcctgattgccctggccagaacttccaatactgtgttgaataggagtggggagagagggcatccttgtctctctcttgtgctggttttcatagggaatgcttccagtggagtagcagttttaacttcctccaagagtgtttcctttgcattcacaacttggctagttgtttagctcaagaggcctagcttttggcctgtctcaacttcctcactaagcttaatcatttctagcttttgatttaaagtaagtcgtttccttttatttgaacacctaggggccattttagagttataattagcccaatttctatatcattttgtctcagggaatagaagcgtgagggagggagagagttgggggaatggctggttggtagagtggtcagaatacacacaacatttataaataaagttagccatctaatatggttgtgattcgtggtacctcacaatgattatgatagtaacataaaagctcactgaccacaggtcaccgtaacagatataataataatgatctttgaaatattgtgagaattaccaacatgtgacacagagacatgaagtaaacatatcctcttggaaaaatggcaccaatagacttgttcaatgtaggattgctacagacgtgcaatttgtaaaagcacaatatctatgaagctcagtaaagtgaagtgcagtaaaacgagatacgcctgtactttgatcctaacttagctgtattcatcactcatgctgtgcaacatttcccaagttgatttctaccaaacgttgttccagggtgtgcaaatcgatgatatgcagaacaagagttctgtgttcagatagagttgggacgtgctgattatactgaatcctgccattcacatttccactctgcattagaatgctaaaagctctgagaagtcctatcataaagaaatttgtgtaacattttaaaaaaccaacatttcccatacacatttgaacataggaattttttgccacagctattaacactacagagcagttttccgtttgttattttcctattctcttctgttgtctttattgtttttgcatctcctcttttcctcttgtgtgctgtttttctccaacttcatttttaaatccagtgtggggaaatggtgagagaaagagataactagactatacaattgtggaaacagtttgaggtcctatgaacaattccctgtaatcccccacaaaataggaagataaagatgtacaagaatctaggagaatatatgaaaggagaaattatagaaaaagaatgtgcttttgacatcatgaaatttctcatagtcatttcatagtcacttattcaataaatgagtcattttttattggtaatctagcctttctccttttaacttctagttttagctagtgttctgtttgtgataacttatgttgcgttaggcagtcatgaagcatgagaataaaaaaatggaggctgggcgtggtggctcacgcctgtaatcccagcactttgggaggccaaggtgggtggatcacaagatcaggagatcgagaccatcctggctaacatggtgaaaccctgtctctactaaaaatacaaaaaattagccgggtgtggtggcgggcgcctgtagtcccagctactcgggaggctgaggcaggagaatggtgtgaacccgggagatggagcttgcagtgagccgagatcgtgccactgcactccagcctgggtgacagagtgagactccgtctcaaaaaaaaaaaaaaaaaaaaatggagctggtatctatagagaacatgacatgacctgtgtgataggaaggtaacacccatacttgtccattccttgatgtctttctgtagcgtcttagattatttttctgtctggagtagttattgacaggttaaaaggaatgaaggtatgaactaattacacagtccatttatactcattttgaggtattctacttccctgcttaggaggctgtctcaaaagtattagtttttttttctgaatcacccacatgaaccatgaatatatatctaaagatatctccagtcacaagcaactattacttattgagaataataatagccagaggatatagcttaatgattcacgagtcagctttacataaagactctatttagtctccctagaaaccaacgatcaaatctcatcagggtcaacttagccttttctataataggtaaattgaataacatgctgtttaatttgtatgtgtgttattgaatgaagctatggagaatatttggtctgcatactaaagatatcactattgttttggtaagtaaggaaaatttcagagttattgtttctaaattatttaaccctgggtgattgaagatacacaagaaacttgaacatgccagtgttacattagagtatttttaataggtaaacaataattcattaatgagcaatttttttctggctagactctggttttctgcctccttttgggtttcatttagagcctaaaattcatttgcctggatagttgatcttattttgtatcttacatttcctatgttgtatgccattttttttggattttatttggaaagataaaactgaattttaaacaattttccattcttaaaaagttacagattgcccaacacttaaatgttcattgcagaaaatttggagaattcaggctagtatcaagagaaaaataaaagttatcagtagtcctactcttagggatagccgatgttaaccactagtaacattattgttaatattcttttagctatttctgtgtatatatataataataataatacgtgtctgtgtattctgtttccagattaccaaaattttagttagttcccagtttaacactgctctaaacattgttttgtaaatatttgtatacatcttatttccttacaatacatttctggaaatggaattgctaggtcaaagggtgtgaaaattttaagatccgtcgttgaaatgtcaaatttgctttcaagaaaggtagtgtattagtcagcttgggctgccataacagaatgccacagactgagtggcttaagcaacaggaatttattttctcaccattatggagactgaaagttcaagatcaaggtgccagcagggctggtttctggtgtggcttctcctcctggcttgcagatggccaccttctgcacgtggcattctcatatggcccattgttggagtgcgtgcagagaaagggagagctttgatgtctcttccacttcttacaaggacaccagtcctattggattagggctccatccataggacctcatttaaccttaattacctccttaaagtccccatcttcaaatacagtcacaagtccccatcttcaaatacagtcacattgaaggttagggcttcagatgaattttgcggagacatacctcagtccatagcagatagtagcattgacatttcatcatcagtgaatgaaagttcccgtttcagcatcttattgtcaatgtcagatatgtataccatatatgtgcacatgcacacaagcatgtacatattgctaatttgatgaagatggcattgttttactttgcatttctttggtcattagttgcagtgaaacttgattataatgtttggacttttttttttttggtgagttttctattcctgtactttgaccatttgtgtgtgtgtgtgttggggttgttcttaattgccagtaaacctacattttcacttgagtgtttagctattctggcaggcatttttgcttatacagaaaaggaatcatattttaaaatattatttatcctttgatattaaaccattatttacctttaaaatatagcaaagtatacagggttaataatatatgatattccgtattaatgaatcatgtttaatgttcaccatacattcgtaaaaagtatttatagtttgcatgcattgatttgctgacagtgaaatataggtagtggcaaggttaatgtagaaatcttttcagatattatttgctctgaattaacaaatacagcagtgtttcctgtgatgtggtccccagaactctgatcccacaagatgtccggtgagaagaaagtctgttggttaaatatttttgacaactgctgcatcctgtacgccccacctagtggttcacagtgcacatagggaactgaaaggctctgagaagccatgtaataagtaaatctgtttaacttttgtaaactgggtacttccaaaacttattttgaccatagaacatccccttatttttttttgtttatgtgatttatgttaactttttattttgaaataagaaaattcacaaaaagttgtaaagaaaatgtacagggaggtctcatgcacccttcacccagttttccccaatagtaacattttgcaaaactatagtaaaatatcacaaccaggaaattgacattcgtgtaatctatagagcttgttcagatttcatcagttatacatgcgctcgtgtgtgtgtgtgtgtgtgtgtgtgcagttcaatgcagttttgtcatgtgtagagttgtgtaacctccaccaccataagactccattgtgctatctctttacagtcacacctaccctctctcctctccctagctcccggcaaccattgatctgttctctctttctataattttgtcatttaaggatgttatataaatggaataatatggtatgtaacctttcgaaattagctttttttttttacttagcataattcccttgaggttcattcagattgttaactgtattaatagttctttcctttttattgctgagtaatattatatgatatggatgtatcatggtttgtttaaccagtcatccataaatgacatttacccccactcctaattctggtggaatctattaataccctgtgtgaatattgtcctgaaaaatagcagttttggaaattctataccacagaaatcatacagttaaatagttgtcagcgttttaaagataatgattgggttgcagaaattaaaaatctttattacttcatttaggaattccagagacgctgtaacactctgatttcattgattgagaaagaaaatatggaaattgaggaaagagagagagcagaaaagaagaaacgggcaactaaaactccaatggtaaaattttcagcattttcctaacttttaggtagatcccatttttttacataattaaaatgcctatattatgtttaatgccatagtgatagctattaataaaagctggttttatgaaatgctaatttgttttggacagaagaagaattgcttcacaaccatgtttcttatttgtttgtagaacatatggttaggaactccctagtaactaggctcagtattttaaaaaattcctcatgaatctaaacagaagtataatgcaagtgaaatcttttgaattgagactagagctatcatgggggtagcagaggggtaggggtgggatgggatggggctgaagttgaaactaggagttctgatttgatcaagtaagttttctgatgtttgtggaattatgagtacaaatgggaactctgagcagacaacaaagctttgcttggtaataagtgaactgttgaattgataggataacttgattttaatccagtcaggttgctttgtacagctgtaatttaaaatattctttaatagatcgtattatttgagtgtggttaagtaaactgccatatttcatcgaatctaagatgccttccattgtaagacacagcattattttatgtaccactgagggaaaatgctgccaggtgtaatttgtcatcagttgtaagttgcatcctgatttcagagatgctaaaatgtgaaagaaatgtgtatcatagaagatatgaaatatggtatgttaaaacctatcataagttttttaaaaaatatatactcataaacaaaattttgcccagaaaacattaagtagttctttaagataagagtacatttataataccatgtgtaagtagatacttgatgactatttttgatgggtattttatgtcttttcataaaaagaaacatctttgaaggttattttacattgggttatatagtttgttgggctatatagaacattaactgtgaatataacatttaagtgaatattcatgttaaaatttttttttaatgcatttacatcctagatttaacattgttgggccatttaaaatgtgcatattggagcagaacattaaatctgtttccattttagtcacagaaaagaaaagcagagtcagctactgagagctctggaaagaaggatgtcaagaaggtgaaatcctaaagcctagaaataaagttttaaatgggaaactgctattttcttgttcccatcttcaaatgctaattgccagttccagtgtattcatggtactctaagaaaaatctctttggttttgatttcttgcatattttatatattttacaatgctttctacctgaaatgtgtagctttatattttatggcattctagtatttttgtgtactgtattttgtgcatttcatgtcttcatcaaaatcctctcagtccttgttcttttgaagcttgtgctgaggttttagcttttctatgttttatatgccgctgctttgaaagagaacctagattctatagttgtattattgttgtttcatactttaaatttatatggctgtggaaaaacgaattaaaatgttttgaggagaaagactttttcacttctttgttgctttcttttctattgagtctgggcttgtttgtgttactgcatactgtgattagcataataattgtttctttgaggtcatctaaatatttttttcctaaaggaataaagggtgaggaaagaaaaatattaaaaaagctaatatttgatactgtgcttgctgtcagtatgcattacatttaaattattctctattcaagtgggaaaatataataaagaaatgtctataagaaattt

SEQ ID NO: 141 - DNA, 3393 bp, Homo sapiens
cagcacagctgcaccgccgagctgcgagcggctgcgagcgagagagcgtaagagcaagagagctagagagcgagcaacgggcactcgccccacgcctcccctcagccccaccgcgcgctccgcttgcctctccaccccgcccgactctacccggcccggtccctgcgcgggcacagcccagagctctggggcggtgcaggcagcctcgggactctccggcgcgccgccgcgtccccagacaaaggcttggccggcggccccggcccgctgcgccctcgctccccgcctccccagctcttctccgctcttcccccccgcgcttggctcggcgcgctccggccggccgcaaagtttcccgggcggcagcggcggctgcgcctcgcttcagcgatggccgcggagctgagcatggggccagagctgcccaccagcccgctggccatggagtatgtcaacgacttcgacctgctcaagttcgacgtgaagaaggagccactggggcgcgcggagcgtccgggcaggccctgcacacgcctgcagccagccggctcggtgtcctccacaccgctcagcactccgtgtagctccgtgccctcgtcgcccagcttcagcccgaccgaacagaagacacacctcgaggatctgtactggatggcgagcaactaccagcagatgaaccccgaggcgctcaacctgacgcccgaggacgcggtggaagcgctcatcggctcgcacccagtgccacagccgctgcaaagcttcgacagctttcgcggcgctcaccaccaccaccatcaccaccaccctcacccgcaccacgcgtacccgggcgccggcgtggcccacgacgagctgggcccgcacgctcacccgcaccatcaccatcatcaccaagcgtcgccgccgccgtccagcgccgctagcccggcgcaacagctgcccactagccaccccgggcccgggccgcacgcgacggcctcggcgacggcggcgggcggcaacggcagcgtggaggaccgcttctccgacgaccagctcgtgtccatgtccgtgcgcgagctgaaccgccacctgcggggcttcaccaaggacgaggtgatccgcctgaagcagaagcggcggaccctgaagaaccggggctacgcccagtcttgcaggtataaacgcgtccagcagaagcaccacctggagaatgagaagacgcagctcattcagcaggtggagcagcttaagcaggaggtgtcccggctggcccgcgagagagacgcctacaaggtcaagtgcgagaaactcgccaactccggcttcagggaggcgggctccaccagcgacagcccctcctctcccgagttctttctgtgagtcgtggccggtcctggcccccgcccttgccccggcccggactccctgtcccacgtccctagtcccagactaccccggaccctgtccctgccgcggccccagccttgacctgtttgacttgagcgagagggaggaagggcgcgcgggccgcgggcgacgggcgggtgcgcgggcgggcaggggaccttggctaaggcgagagtagcgcacgccagcgccgcctcctagactcgagcagagccggagagagagacgagagggtgggaggtcccggagtaacttctctccaggctgaagggcggcgaggcatagtcccgagaagtcaccaaggccatctggagactcctggctttctgaactttgcgcgttaagccgggacagctgctttgctgcccggagagtagtccgcgccaggaagagagcaacgaggaaaggagagggactctggcgtcccggcaggcgagaggcgaggctgagcgaaagaaggaaggacagacggacctgtctgtcagagttcggagaacactggctctcagccctgagacacaggcctcagttaggacgctcggcgcccaaatctcatcagttttattgcctgctcgattatatagaaaaatacaaaaaatctgcattaaaaatattaatcctgcatgctggacatgtatggtaataatttctattttgtaccattttcttgtttaactttagcatgttgttgatcatggatcatactccccttgtttctttgggtgagaagggatcgcagtttggaaactccggcggctgcgtgcggggtttcagtcccagctgtaggcttgtaaatacccgccccgccaaaccgcatagagaacgtggcagcaagctgagggtctttgtttgggtttattattacggtatttttgtttgtaagttaaaaagaaaaaaaaaaagaaaaagttccgggcattttgcatcagaaaacaactttgtcttggggcacacttggaagttgcatgttttctttccttcccttatccccattcggtcctctttttcctctctcgctttagttttcaaccttgttggtgctgagagagagaaccgagaggtcccagtacaagggcagggcagggcagggaagctgccaagctccgcaccccagaggagtgttctggactacagccttgtcttatggtcaaattgatacccttaataagaaaggaaaggaaaggaaaacagatcctcccctctgctttttattgtaaccagaatcaccctgaggtcccttctgaaccctctgggcctgcgctaattgtaggagccacagcgctcctagggtgagaggcttagccatccctgaccctggcagtgcactggtaagcagacactgcactgaaccaactgctatgctcagaatgtaccagaaacccaaacattggcaagtaattttgcaactttcaagtgcgttctttagaccaatgcattgcgtttctttccctgcttttgagatagtaggaagagttcttggtggtgtccccccccttcaattcttcagttgtatagtagttatagggaagatatgggtgtttttctttattattacttttttttttctgcaggtcagtaaaaggatttaagttgcactgacaaaaataccaaaataaaagtgtatttttaagttcccatttgaaattgctggcgctgctggccggatgcatttttgagtttgtattagttgataaattaacagtaataacaagattgtatgaaccgcatggtgcttgcagttttaaatattgtggatatttgtcctgcatcagaaacgagctttggtttttacagattcaactgtgttgaaatcaaacctgccgcaacagaaattgtttttatttcatgtaaaataagggatcaatttcaaaccctgcttatgatatgaaaatattaaaacctagtctattgtagttttattcagactggtttctgttttttggttattaaaatggtttcctattttgcttattaaaaccatggaaatggtgtttatttagagga

SEQ ID NO: 142 - DNA, 14872 bp, Homo sapiens
atcttttttcatcttctagctgtagctcgggctgcttgtcggcttggcctccccctcccccctttgctctctgcctcgtctttccccaggacttcgctattttgcttttttaaaaaaaggcaagaaagaactaaactcccccctccctctcctccagtcgggctgcacctctgccttgcactttgcacagaggtagagagcgcgcgagggagagagaggaaagaaaaaaaataataaagagagccaagcagaagaggaggcgagaagcatgaagtgttaactcccccgtgccaaggcccgcgccgcccggacagacgcccgccgcgcctccagccccgagcggacgccgcgcgcgccctgcctgcagcccgggccggcgaggcgagcccttccttatgcaaagcgcgcagcggagcggcgagcgggggacgccgcgcaccgggccgggctcctccagcttcgccgccgcagccaccaccgccgccaccgcagctcgcggaggatcttcccgagcctgaagccgccggctcggcgcgcaaggaggcgagcgagcaaggaggggccggggcgagcgagggagcacattggcgtgagcaggggggagggagggcgggcgcggggggcgcgggcagggcgggggggtgtgtgtgtgagcgcgctcggaggtttcgggccagccaccgccgcgcaagctagaagcgccccagcccggcaagctggctcacccgctggccacccagcacagcccgctggcccctctcctgcagcccatctggcggagcggcggcggcggcggcggcggcggcaggagaatggcatcagaactggcaatgagcaactccgacctgcccaccagtcccctggccatggaatatgttaatgacttcgatctgatgaagtttgaagtgaaaaaggaaccggtggagaccgaccgcatcatcagccagtgcggccgtctcatcgccgggggctcgctgtcctccacccccatgagcacgccgtgcagctcggtgcccccttcccccagcttctcggcgcccagcccgggctcgggcagcgagcagaaggcgcacctggaagactactactggatgaccggctacccgcagcagctgaaccccgaggcgctgggcttcagccccgaggacgcggtcgaggcgctcatcagcaacagccaccagctccagggcggcttcgatggctacgcgcgcggggcgcagcagctggccgcggcggccggggccggtgccggcgcctccttgggcggcagcggcgaggagatgggccccgccgccgccgtggtgtccgccgtgatcgccgcggccgccgcgcagagcggcgcgggcccgcactaccaccaccaccaccaccacgccgccggccaccaccaccacccgacggccggcgcgcccggcgccgcgggcagcgcggccgcctcggccggtggcgctgggggcgcgggcggcggtggcccggccagcgctgggggcggcggcggcggcggcggcggcggaggcggcgggggcgcggcgggggcggggggcgccctgcacccgcaccacgccgccggcggcctgcacttcgacgaccgcttctccgacgagcagctggtgaccatgtctgtgcgcgagctgaaccggcagctgcgcggggtcagcaaggaggaggtgatccggctgaagcagaagaggcggaccctgaaaaaccgcggctatgcccagtcctgccgcttcaagagggtgcagcagagacacgtcctggagtcggagaagaaccagctgctgcagcaagtcgaccacctcaagcaggagatctccaggctggtgcgcgagagggacgcgtacaaggagaaatacgagaagttggtgagcagcggcttccgagaaaacggctcgagcagcgacaacccgtcctctcccgagtttttcatgtgagtctgacacgcgattccagctagccaccctgataagtgctccgcgggggtccggctcgggtgtgggcttgctagttctagagccatgctcgccaccacctcaccacccccacccccaccgagtttggcccccttggccccctacacacacacaaacccgcacgcacacaccacacacacacacacacacacacacacaccccacaccctgctcgagtttgtggtggtggtggctgttttaaactggggagggaatgggtgtctggctcatggattgccaatctgaaattctccataacttgctagcttgttttttttttttttttacacccccccgccccacccccggacttgcacaatgttcaatgatctcagcagagttcttcatgtgaaacgttgatcacctttgaagcctgcatcattcacatattttttcttcttcttccccttcagttcatgaactggtgttcattttctgtgtgtgtgtgtgttttattttgtttggatttttttttttaattttacttttagagcttgctgtgttgcccaccttttttccaacctccaccctcactccttctcaacccatctcttccgagatgaaagaaaaaaaaaagcaaagtttttttttcttctcctgagttcttcatgtgagattgagcttgcaaaggaaaaaaaaatgtgaaatgttatagacttgcagcgtgccgagttccatcgggttttttttttagcattgttatgctaaaatagagaaaaaaatcctcatgaaccttccacaatcaagcctgcatcaaccttctgggtgtgacttgtgagttttggccttgtgatgccaaatctgagagtttagtctgccattaaaaaaactcattctcatctcatgcattattatgcttgctactttgtcttagcaacaatgaactataactgtttcaaagactttatggaaaagagacattatattaataaaaaaaaaaagcctgcatgctggacatgtatggtataattattttttcctttttttttccttttggcttggaaatggacgttcgaagacttatagcatggcattcatacttttgttttattgcctcatgacttttttgagtttagaacaaaacagtgcaaccgtagagccttcttcccatgaaattttgcatctgctccaaaactgctttgagttactcagaacttcaacctcccaatgcactgaaggcattccttgtcaaagataccagaatgggttacacatttaacctggcaaacattgaagaactcttaatgttttctttttaataagaatgacgccccactttggggactaaaattgtgctattgccgagaagcagtctaaaatttattttttaaaaagagaaactgccccattatttttggtttgttttatttttattttatattttttggcttttggtcattgtcaaatgtggaatgctctgggtttctagtatataatttaattctagtttttataatctgttagcccagttaaaatgtatgctacagataaaggaatgttatagataaatttgaaagagttaggtctgtttagctgtagattttttaaacgattgatgcactaaattgtttactattgtgatgttaaggggggtagagtttgcaaggggactgtttaaaaaaagtagcttatacagcatgtgcttgcaacttaaatataagttgggtatgtgtagtctttgctataccactgactgtattgaaaaccaaagtattaagaggggaaacgcccctgtttatatctgtaggggtattttacattcaaaaatgtatgtttttttttcttttcaaaattaaagtatttgggactgaattgcactaagatataacctgcaagcatataatacaaaaaaaaattgcaaaactgtttagaacgctaataaaatttatgcagttataaaaatggcattactgcacagttttaagatgatgcagatttttttacagttgtattgtggtgcagaactggattttctgtaacttaaaaaaaaatccacagttttaaaggcaataatcagtaaatgttattttcagggactgacatcctgtctttaaaaagaaatgaaaagtaaatcttaccacaataaatataaaaaaatcttgtcagttacttttcttttacatattttgctgtgcaaaattgttttatatcttgagttactaactaaccacgcgtgttgttcctatgtgcttttctttcattttcaattctggttatatcaagaaaagaataatctacaataataaacggcatttttttttgattctgtactcagtttcttagtgtacagtttaactgggcccaacaacctcgttaaaagtgtaaaatgcatccttttctccagtggaaggattcctggaggaatagggagacagtaattcagggtgaaattataggctgttttttgaagtgaggaggctggccccatatactgattagcaatatttaatatagatgtaaattatgacctcatttttttctccccaaagttttcagttttcaaatgagttgagccataattgcccttggtaggaaaaacaaaacaaaacagtggaactaggcttcctgagcatggccctacacttctgatcaggagcaaagccatccatagacagaggagccggacaaatatggcgcatcagaggtggcttgcgcacatatgcattgaacggtaaagagaaacagcgcttgccttttcactaaagttgactatttttccttcttctcttacacaccgagattttcttgttagcaaggcctgacaagatttaacataaacatgacaaatcatagttgtttgttttgttttgcttttctctttaacactgaagatcatttgtcttaaataggaaaaagaaaatccactccttacttccatatttccaagtacatatctggtttaaactatgttatcaaatcatatttcaccgtgaatattcagtggagaacttctctacctggatgagctagtaatgatttcagatcatgctatccccagaaataaaagcaaaaaataatacctgtgtggaatataggctgtgctttgatttactggtatttaccccaaaataggctgtgtatgggggctgacttaaagatcccttggaaagactcaaaactaccttcactagtaggactcctaagcgctgacctatttttaaatgacacaaattcatgaaactaatgttacaaattcatgcagtttgcactcttagtcatcttcccctagcacaccaatagaatgttagacaaagccagcactgttttgaaaatacagccaaacacgatgacttttgttttgttttctgccgttcttaaaagaaaaaaagataatattgcaactctgactgaaagacttatttttaagaaaacaggttgtgtttggtgctgctaagttctggccagtttatcatctggccttcctgcctattttttacaaaacacgaagacagtgtgtaacctcgacattttgaccttcctttatgtgctagtttagacaggctcctgaatccacacttaattttgcttaacaaaagtcttaatagtaaacctcccctcatgagcttgaagtcaagtgttcttgacttcagatatttctttcctttttttttttttttcctcatcacaactaagagatacacaaactctgaagaagcagaaatggagagaatgcttttaacaaaaaagcatctgatgaaagattttaggcaaacattctcaaaataagagtgatattctggatgtagttattgcagttatctcatgacaaatgaggcctggattggaaggaaaatatagttgtgtagaattaagcattttgataggaatctacaaggtagttgaatataataagcaggtttgggcccccaaactttagaaaatcaaatgcaaaggtgctggcaaaaatgaggtttgagtggctggctgtaagagaaggttaactcctagtaaaaggcatttttagaaataacaattactgaaaactttgaagtatagtgggagtagcaaacaaatacatgttttttttttcttacaaagaactcctaaatcctgagtaagtgccattcattacaataagtctctaaatttaaaaaaaaaaaaatcatatgaggaaatctagctttcccctttacgctgcgtttgatctttgtctaaatagtgttaaaattcctttcattccaattacagaactgagcccactcgcaagttggagccatcagtgggatacgccacattttggaagccccagcatcgtgtacttaccagtgtgttcacaaaatgaaatttgtgtgagagctgtacattaaaaaaaatcatcattattattattatttgcagtcatggagaaccacctacccctgacttctgtttagtctcctttttaaataaaaattactgtgttagagaagaaggctattaaatgtagtagttaactatgcctcttgtctgggggtttcatagagaccggtaggaaagcgcactcctgcttttcgatttatggtgtgtgcaagtaaacaggtgcattgctttcaacctgccatactagttttaaaaattcactgaaattacaaagatacatatatatgcatatatataatggaaagtttcccggaatgcaacaattagcattttaaaatcatatataggcatgcacattctaaatagtactttttcatgcttcattgtttctctggcagataattttactaagaagaaaaatagatattcgactccccttccctaaacaaatccacgggcagaggctccagcggagccgagccccctggttttctcgtaggccctagacggtgttgcatttatcagtgatgtcaaacgtgctcatttgtcagacatagctgtaaatgaaaacaatgtgtggcaaaatacaaagttagttaaatacacaccctctgtgtgattttttgctcccttttcttttttgctcctactcaaaaaaaaaaaaatcacctcctttacatttccctggcttcttgcatgtttcccttttcaaaaaccatgtaataattttttacaatgtatctgacacattaatatattgacatcaaataggcagacattctacttttgcctggcaaataaatctgctacggagacatcatttcctcactgtctcaaagccataactacctgggagtctttcaacacagacccctccgatgggaaatgctgtttattactgaatgcaggatgctcacgctctgatcttttctcccttgtgcctttaccccagtcatttttacttagcaacaccaattctagatacttctgttctgaagtagaaccacccccttgccacactgccagttttcctgctaaaagcagtggacagaagacagatcatggtcaccctcacaaacatggcacacagctgtctcggtagctgcattcccagcatgtcctggtctaaatatctagagttgcctatgacacgttcaaaggttcccaagcacagtacattgggaggcttttgctgctgtggccgttgttttcgtttaggccaacttacttccgtattcacatactcttggctttacgaaatacactcctccagtctactaggccaatcaatatatttaaaagtctgattgccacataagtctctctctctctctttttgttttttgtttgtttgtttttttctgttttggctgccggtagttaaagactgagataggttggaagactaaaatacaggagtacatgagtgacaaccttcagccgtctgatttccatgccggtaaaacacacaaccaagctcttcttagcgctgctaatataaacattcactaagagggaataggaagtgagatttaccagcttcactttgctgatttgcaaggttccccactacgattcactgtcatttgatttttgaaaaataattttgtccgtctctttgaagaaatgtcttagttcttttattttgtttgtttggttttttttagagaagttttatctgcagtgataggctacaatttttatctccgctgattatttgtcaggatgctgaatgaataatttggtcctgtgccttccttgttgttctgaggaaaataagagaaacttggaagtttgtttcactcttagcccatcctaaatctaaaagaagatgtcccaggtccaggcaggccatgtagtagttataaaggaggtggtccaggtccagccacctcaatcaggatttgtttgttttgaagcatttgcttaaaagcggagcaagagtcttaacccaacttgccataacactgcttttctcgcttttgatgtaaatcttcaaaattcagacatcaaacagccccagaaaaggggaattctctccaggcattgctccgccccagctcctgaacaaacccagctctgtctagcatttttttccctagcgggggtaggggacagggtgagagaatttcagtctcccaggctgtctcatgattgttagggcataaagaaacacagtcctgccacaaattgggagcatctttaccctttagagagaaacaaaacaaaactaaacaaacaaatcaaattgctttgcatgaaggcgtagcaaataaaatctcgggctccctgttccctgcaccatttgtaggaggtgagaaatgagggaaacaagagaaaggggaactttaaaagcgggaggcccagaaataatccctgttaccagtctgaatttcacttgctccgtggctaacgtcagacctagtgtgcatgtatgccagaagtaaactaggctcggctgtccatttctttaaaatatgttcacatgtttcctttttgaaaacaattttggggactaaacccaaatggagagatttgaggaaatcgttaatgtcttaacatttgagtatatttataaatgtatcagtctgtgattcataatggtgacattttggaccagccagacatgttgtaccaatatttaaatggtcactgcaatagttttatgacatcgtgacagtattttattgtttaaattcgaaggccctctgtgtgttttccgtaagtctgcccgaaggaaaaaggctgagatgggaagagcaaaccaacgacgcacagaaataagatctttctatgaattttcatcagagtcgtacagttttaagaaactcataaaacacattttccacgactatgactggaatgcacagttccttacacaaatcgtagcctctattgagcacctcttctcttgttcaacacaattcgtttccttttccttcctttttactaaataacagttttccctataattagaactgtggattgcaaaatcacattcctctcttctacagagatgcaccttagatctttagttacaattagaaggagcattaattcaagaaaggaggatgaaggagtcgtgtctgctgagctttgggaaaaagagtggaaggagaggaaggagttttctgtattttcccctgcactcctcaacctgcccctcacccctcaacccaggccttggtgtgagctgcagaccagtgattcgcattctgaatttctctattctaaatattctgattaccagccttgaccgtttccaagctgagattccaaagaactattttttccttgtggttggtcctttccgttagggaacaggagaagcgatgaaaccttatagaactggataggaaggagagaaaatcactctccttccagaatccccaacaaggattgttgtaaagggaacactggcctgaaaaattaggtcaggagttcagagtccctttttgcaacctatagttgccctggttctctatatgacctcatccacttcttgaggcctgtagaagtgcgtttctgacttttgttggaggaattctgcagaaggaaagcaggccgaggatcccaggacaataggcaaccccaaactaggcccagagagcagaggagaggaagggacctgcctgcagaggctgggagagtatggcccagactttaacacaggccaaccttggcttatgacctccagtcaccaggggtcagctccaggtcattctcagagtccccccaaaacctcccaccaagaaggatctgtttgcagggtgactgacaagccgctgacaggttgtgagctctccacagagtcctagaaacaacagtgacgtccttagcaccagggtctgcacccttcccacctgactcctgtccaatcccagtgtcctctccataatttctgacaccttttccttccatgcctggtcatccagggccatgaaagagcctcaaaagtcactgtcctcaggccaacaagtggcagaagctgagatctgggacccaataagtcacctccgccccactttaagtgtagacacagacagcgctatgcagagggtccggggagcatcactggaagctcagctggaatctttaaagctggccagagcttttggtgcaatggtcttgaagcctggaatgaaggagatgtaggcagagaggatgctgagtttgtcccctctcccattttctaagaacaaccctccctccatgcccccccatcatccccccctccgccaacctggcccgggacaggaacaccgcatcccagtcctttatgcatgggttctgcggggcccaatagccctggacatcactgcccgagcctggtggctgcagctgcgtggggctgggtgtgctccccaccctctgaggtcccccgaggggcgtacagtaggtgcgcagggactggagcccagacagagggggcgggtcccgaagattgcctgaagctaccgagtccctcagtcctgggccgggcctgcagtcccagacccgcggcagtgcccagggagccggtgcgctcagacgccagcaacgcagcgcccctcggagatgcccacgacgccgcccggcgcccgggggcgctaatgacggccacacccagcgcgccccagggccccgcgcccacccaagctcccgcacccctgcaggagctcggattgtgttcaaatttggtttaaaaagtcaaaaggactgccctagcgcgagcgagctccgggggatatcaaaactccccggtgcgccgctctcctgggtgggcgggcgcctggagggagggagcaagactcggtcccgcaaggctccgcccttcaccttgagaccccctcactccacccgatcgcggccccaggaaccctctgtaaataagatcatcggctccagatcatttgatttttcttctattagttttccggcccattttccagattttttttcttttttctttttttttcctgcttcggttagagacagagtaagagggaaaaagagaaaggcaagcgggaaatccagatagcatgtttaaaaatctttatggaaatctcgatacggtttggggtttccgtggtgtagtttgatgcacattataaaacaaagtcagtcaagcaaactttatgaggattgctccaacagcgccaggatgagggtcctgcctgcattcttggatttcatacagttctagacacatctcaggcatccaggaactgtctcaagaggacagacttttaaaaccactaatttcagaaagcatcttttccatgaggggcctttttcttagagggaccctcggtttgtgagaatacttaagttaggcaagtatcgttacaccttaaaaaaaatctactttttactctctccctctctcttagggaaggatttattcatgcacagatagatacattgaaactaaaacaaacatgtcagtatctgagatgctttttacactgtcagattttttatgtaaatcttgtttttcatagaaggcggaaaaaccctcggtaatctttctaagattttatctgttaaaaggtgatgtttgtgtctttccatcttcaggcattcactccaatatattttttcatctggcttaaaaaatttatttatttatttattcatttattttttcctgggaccctttaacacattagggagggggcaagctattaaaagataaatctggcccggtgtggtggctcatgcttgtaatcccagcactgtgggaggcccaggtgagcggatcacctgaggtcaggagtttgagaccagcctggccaacctggtgaaacccggtctctactaaaaatacataagttagcaggacgtgggggcacgtgcctgtaatcccagctactcaggaggcagagacaggagaatcgcttgaacctgggaggcaggagaatcacttaaaacctgggaggcggaggttgcagtaagcccagattgcgccactgcactcaagcctgggcaaaacagcaagactgtatcttaaaaaaaaagaaagaaagaaagaaaagagaaaaatctacagttcccactttatgaaataaaaatgatccgaaaggcagacttcatcagtcaactctgtcctttggtagacatgcgcagagcctgggctgaaactgctgtcttagggcaatcttcccacgtaaaaggcaggtaagctccctttgccagactttctgtgactcggagcagtgtggagacacatgctgacagcctgcaacacgttttcaggttgcgatccccatgtaaatttactgcactgtgcaggtaatgagcccttttaaaatcttccctggaatatcagtgcatgctcctgtactatttaaagaactcttcaattgttaggtaaacagatccaagtgtaagagctatgtgctcgtagacatgtggcttagattacttcactgcggcccagctcgaaaatctctcttaccccgatgtgagacctccttttcccccaccatctttccccagtaagtggtctgaaagaaggtaatatgaacacagaaactgcaatggcttttggacgctattcaggtgtgcaaatagtatctaccccccccccccttttgaaagtaaatgctttgataacagggtggtttccccagatggccagagagtagaggtcatcttgaagaaaatgacaccaatgatctaaaaaggacatctactttatgagatttcaggcaagatgccaaatatcgcatttaatgaggcctgttttttttcctccaaaaataacggagactatcaatgatatggtcaggaaggcaaagggggcattttgcaaagcctacgtccaattattgctctgtaataattttctaaaattgaaaaatgcctcacaagtatatgatctcatgtaaatattccttgccgaagcttaacatatgtttgcaacgtccccaaggaattacaaaaatattctccccacaatctcttaagcttttaaactctattcactggcgtttctaaaagactctgttgtttctaaagattaaaaaaaaagtaatcctatcggggaagtttttttttaaagagattagccatctgaacttcaaatggagaacaactgatactgatacacttccaggttttatcacttcagtctgtttcttgtttctttcctattattttttgcatagaaattatatatttggcaaaaaaaaatgtatactaatacgtaaaggcgagtagtttctaccttaagatttgaaaagcatttctatacaaaatgtgaataaacgcatataacgtgtttagggcaactttgacagatacaagggtaagaaatgatttatccgagtgctgtgggcatagtcttaccatttagataaagggcatttgaaggaattagagggttatgtggaatgaaaatgtaagtaaagaaagattatatgttctgttacagcagcctagagaattcagcaggtgcatgagcatagctcatatttgttcgcaccaattgtaaggtaatccaaataaaagtgtgggggattaaagaaaaataactgaatatccatgttggaaaaagaattagattgacttactagtttatcgccgttattgtacacagattttctgtgaccatgttgaattttttaaattagattttaaatatattttgacagtccgaacttctatattgtgactagctataggaagaaatgacaggtctgctttgttattaaactgctgtctggaaaatattggactctgtacagtaaatgataattattttgccacttacattagtacagctaatagcaataagcgttttttgaaccatagaaagctaactactttgaattactgtgctttgttattcactgtgaagcaaaaagattttctttaaagcaacctcattttcatatcaccgttctaagcactccctgctactaatttaaacagggcagaagttaacaaataaagaggcagtatctaagctgttctatttgttaaaagaacatttgcagttaaggtcagtggtgccagcaggatagacaaagcaacagaggaggtgggggcagatggaagagaaggaaccctagcacacaccggcagaagctgggccagtgtggttctcccaggggcggacagcctgagagtccttgagagaagcccaacagaaatgattcaaatccttcccttctatgaacccagaatctcttggctccctttgaactcaggacagcttcaaagctgatccaggctgccaaccagtgggttatggctatctcagcctctcagttgagaaacagtagttcagagggagtgaacttgtaacgcaggccattcccttccacgtcaacccctcctctggcttgacagggttgaggccaccacccaaaagcaaatggaacaaaatcactcttcttttggtgtaattctgcccttttgatagatagttaggctgcctgtagcatactgttcttgaaacattcttcgtggttattaattaccctttgtttattttaatatatttactaaatcaggtacccaagggaatcctctacatcagtgatgtgaaaaaatccagttgcctgaagtcaaagaggtacatcttgatttttgatttgcatgtgcttgagttt

SEQ ID NO: 143 - DNA, 164597 bp, Homo sapiens
gggcggagcgaccctcggaaggggcgtggcgaccgggctcgacgcgcgcacgcgctctggagccccacggctacgtgtcgggccacgtgatgcccaccccgaaagtcccccgtgaagcaacaggacgttaaaaaaaaatttctcttctgcggggtggataagaggttctgaaaaaactatagtaacgggaggcgaggcggaggcagcgctggcgcgtcccgctggaattcctctcgcctgccgcgccagccccgaccgcgcccgcagccccacccgccccgtgccgtggaaagccccgcgccccccccgcggccgtcggccccgcagcccacacccacccgccccgggcgccccgcacggcggcgacccagtccttgcgcccaggcccgccgagcgccgcagtccgtcacactcccgttgcccccgtcgcccgccccgccggggaggcagggaggagggggcgcggcgccggcggctgccccggtcgcggggcggcgggcagcaggcagcgggagcgcgccggccgggacccgctaacggccgccctgcgcggccccgcccgccgcccgcccccggccctccccgcgccgctgcccctccccccgccgccgccgctgctgccgccgccgctggcagcgccgcctgaactgaggcgaactccgccgccaagtgagtgaggaggaggaggaggagaaggaggaggaggaagaggaggagcgcagtcggagcgcggcggcagcggcagaggcgccgcggcggggaccagcccagagagaccccccgagcccgcggcacaggcggcggcggcgctgagcgggctcgaccagccgagcgagcggcggccccggctcctcctcgtccggcgccagcagcccgcgccccgcgcccgcactcggccagccgagacccgcctcccgcccgcccgccggcctcgtgagggacgcgccgagccgggcggccgagagcggcggcggctgggagcgcgtcgggcccgggcggaaagtgcctgcggggggcgggcgagcgcgcggtgccggccgccccggggctcggcgcgggagccagagcgggagccggcgcggagcgggacgccgggtcccgagcggcccgcggccggggctcgcccccgcccctccctcctctccggcggcggcggcggcggcggcgggcggagtgagctgcggagcctggaatatggtcggggaaatggaaacgaaggagaagccgaagcccaccccagattacctgatgcagctgatgaacgacaagaagctcatgagcagcctgcccaacttctgcgggatcttcaaccacctcgagcggctgctggacgaaggtgagcgtctccagggccccggccccggcccgacccccgccggggcggcccctttccccgcttgggatggtggggagggcgggaaggtcacggccgggcgggaccgagcgccggggggactgggaggccaggagggcgcacaaaggaggtgccgggccgggcttgcggcgggcgggcgggccggggtggacccgccggtgccggacgccccctgcccggccgggaccccgcgccgctggcgtccaagttggcgcgttgcggagggctgcggggtgagccctgcggcccctctagcttcggcggtcacatttccgagaggtcggcgggggctgcgcggactcggtggtcctcgccgagccctcccgagagcaggcccacgccgcgccgccggcctggaggacgcgtgtgcccggcgcgggccccgctcctccgctcggcctcccgagcctgctctgcgcggacccccaccgccccgcgttcgggagctctcccctcccgtgaggactaaagcggggtttcgtggttggggagttggtgcagctgttcaatactaagtggaagtcagtgtggggctcgttagtttaaagaaattccgtaggagaccgaaattatgctggcgtagccgacaaggaggactaagtgacggcgaaaagcacttttttcccttttgtttggggaagcgagaactgttagggagttgaacttcacttttcgggggtggggggggggggggtggagtgcgaaataacgcgatgacagatcggagcgcagcctgagttagaagaacttgggcggagggtttgctcccggggacgcagccgcctgagtttgtaggacagggtttcgagacgtttggaaagggcgaaataaaattgagccaaagtttccaaaaagctgtatggagcgctgtggggagtgaagaatgacaagaagattaatgttgaccaactttggaatttccttaagaagttctcatagcagtacctgaagtattaatttctagtagctgtgggtttctgtggacgcctagagaaaaaaaagaccacaaaaaaagtctgtttcgaaaatcgactggccaggagtttgtttgtttttttttcctgcttagaggcaccaccggaggactgtgtaaaggaaactgaaaactacaggttgaagagatgaacaatggagtttagatttttcgcaagaatttcgagattttaaaaatagagtcggggaacaggagtttgaagcttggggagttggaatgtcactagagaacaaaaggccggaaatgtttccatgataaaaaatggttaaagaaaaatcccaggagttctgttgtcttgaaagtcatagaaacaacttaaaagtagaaaatggttaggtgttacggctttctcgtcgttttgcttccgtatgttaaacatacagcactcaccaacgttgaaatgggcattttccgctgttggaacagcaaatctgttaatttcaagttgctccagagaaaacctgagctgtccctttaaggggttctgcttttcctatttgtgttggcatttgaaagattgtggaggcagaaaactttctggaatgtcaaaaaaaaaaaaaaaatgctggaactcttaaattgagtatttccaaatgtgagcgctaaggggcgccagttattttttaaccatggaaatggttggaacaaaatgtgtaacatactcaatctgactgacctatattaaatttagttgaaacttaagttatagattatttgatttgtcataatgtgtttatatagtgttttcgaacattgaaaatactttccttaaaattattggcacaactttatgacgtttcaaaataacactcttactgtcttctccttggcatattttggttaagttaaagttttagtagtattagtaacaatttctggtgaaagtttgttttcttgagtgcagttgtttagaaggaatcctttatcgacgataaaatgaaaataggccttggcaatatttagggttaattaaaattaaattgcattcctgaaatgtcgaattcaaagactataggagattccaaaaaaaagtttgaaaatactttcaccttatgtatactatttaaaaagctgcatacttttgcgttctttagttttaaaaggcttcttgtgcttttatgttgatctaaaatctctaaatttagagctgattccttgttatcaagtttccaaccttaggctttaataatttttaatctttcaaatccagaaatttcaattatgtcattgtctctgacaaaggcttatttctctctggttggaaatagtactcgtttgcgttttaaatgtaagagaccactatgatatctcctagataatgtttgtttccccttccccttttaatgtggtttactccatctcttgtcttgctatctttagttttagccttgtcaattccccagtgtaaagattgcttctgtgtggcatatagtatgtttaaaatgggcaatataatgacgaggaagtttgattgttttttatcagaccagtacaaacatgcaggaaaaagggctattccttagtgtggaataagcggcttcctgtaattgttagccttgttataaacttaatttgacttaagaaaaatattggtttctgaagtccatcacatttttttttctggatgatttaattgtgaaatttggcatcttgtgctttacccctttgtggtttgtcattgtccaaaacaaattgatcatgacttttgtttctggttaggcattacttttttttttttgcctataatgcttggctgaaaaattacttttaaatttagataaaatttagtaaaaattttactttagtgattggtttgatgaagttaacatcgtgcttagagtagatgtattttctgataattaggaattttaaatgagattttaaattttttattttaaaatatttttcaaagaataagctttttaaaaatatgcttgtcagcctaagaatttccatttggctagttacaaatttgaggattaagtgtgctggttttcccagttgatgaagacttggatgttttagaatgagtattttaattccttgccaagttaacctttagtctgtatcttgactgtggacagtccttttgttttactgcttgtttttgttttgttttgttttttgctgttgctggtggtgggggtgtgtgtgccagctcttccactgaagtatcttcaacacggttgttttttaaagttgtgaatacattttaggttgggcccatcataaaatataaaggacataaacttgagtttgaaaccttttattgaagatagagatgattataggattacacataaaacctaggtcttaaactgctctacctttagagagacgttttcaactgaacccttagagcagttaatatatggtttttaaaaaaacagacttttcttgtcatgagaatgaaacaacagtagttgaatgcaaattgttataataaagttttgtaatttagaatcgagaaggtgaagagtacggtctattagacttaacaatcctgtattaggggaaaatggagaactagtattttaaaagctgattttgagttttcaattttttaggtggaggtgggcttaaagctgctgatagggaaataaaaaatgtgtaatgaggaagaacagtcaatctttttatcgtggatatcagaaaaattagtgtgtggctcagaaaaagagagcagatggattagaatgccgtattactgatttgaaaatatattttcattttctgatggtctttttgtgtttacagtaaactttctgtctgacctcagtttagtttataccctgcctgctccctctcctttaaatatatgagtaaaaatatttcgttaaaacttgcttaaatagttgctattttttcatgttaatgtttattttcacttcttctgcctctgttattggatgtatcataaggttttcttaccataatttttttttttcctgagaattcatttacaaaagccttgacttaagaattatatggtggttggtattgagaggactcttgctatacagatttcttacaaaaaggttttctttttgtctgaagaagcaattactgttgtcagtaatcatcatctgtaacaaacagattttaaggtgaaataatctgttctttagaaactaagatattgcttttgtacacagtccttgaattagttgtagcaagaaggaagctactatttataatcacttctttccattatcttttctcacccaggaggtgtcagcagctatatattggcagtcacggaaaagatcagttgtatcattatggggcatttattaaacattcattctgtacttttaaagctaaattcccctgtaggtggaacgtgattcctttggaaactgtatccagtttacatgttttgtagtaaaagttgtatccgactgtaacacagttgagttgatagaaataggtctctttgctagtcacatttacgagtgtattttgggatgaacactttttcttaaatgactgagaatgtcaagttaaatcaagttaatttgacttcttaaatgctttatgcacattatatttctgttaatgcttcactagtcactgtcgctgtcctggagctgattgaaattggtcagtttcccataagagcaaatggtttttggtttcctttttcagggaaatagatttctgtgatgaaagaagtgaagtataataaaaccctcatgctttgacctggccttcaccgaagcatgattcagattctttttttgaggccaatatacttagacatgtaagggcttttcttttcttttcttttttttttttttttttggtggtttttttctttccttttttttttttatggtttggtttggtttttatatcaagggaattacaccagtgtgatcataggagcaactttttataaactggaactacagtttaatttacttgagaaattcggtgtagctaatacatttgtttgatttatttgtttgatgttgcagttgtaagcaaaacttgcccttctctgttggagatggaaaatgctgtgacattgttggtttttgtttgttgataacttaaaaggcagcccactgagcaactttctgctattggtatgtcagctgttatgaacatatccaaggttctattttaaggccaagggatggggagtggtgagtgggcctatgttaggaggtcacacagatatataccagctttttatttacatgatcaacgggacttcatttttttctccagtccctcctgtgtttgacattaagacagcttaatgtgaattttaagtgcaataatgtgttgtttacccttaatgataacttttagggaatatttatacccctttaaaaaagttttgggcccacaatagctagattatttcgtgttttacagttatattttttacttaacagaaaatcacaactaacaataaacttttatggtgaatatagtttgttatcttagtgggactgttaagaaatttgtttataaccccagtctgtgttaggtactaccttctatggagtgatcattatagttagcattggaatattattacctgtctgccctcttaaaattactttcttgaaggtgcctaccttagagcctggcatacacttctcagatgtttgttgaattaaacatgttgacatcttacctccttttttgatttctagtttctcaaagatagggtatgtgcacatggtttaaaaaaaaatgaaaatctgaaagtgacattagaaatattgtctaataattttaagaaatgaagcagttgtgtgattgttgatagttttgtgcccttagaggaaaaggcacttatatgttttcttaaaaacaacttaaaaacatgtcatgttatttgtagtacttgctgccaaggtgcttaattttactttactgtcattgttgggaaggagatttaggaagataaaattgctttacttaaatagtatagtttcttgtcagtccttataccaaagggtatcaattcataagcagagaaaaactaccagtgctcatctcagctcttggaaaattttggcatttatggaattatataggtaaactccccaccccgttagttacccttttaaaagtccccacatatatagttcttgtactccatgcagggcacaatagataggaatgatttcttgtccctaagtgctgctttggtgtgttcaggataacgactgtatttgattgagtgattttagtttaaaagaaagctgagtataatcatatgtggctgattgtcatttaacacaaatagctatgtttttaaacacaggtgtgtcttttaattttaaacagtgccattacttagaaaactgataaattgaagttttcacttagctgaaactaagctcttttatttcttttttcttttttttttttcagttggagtctcgctctgtcacccaggctggaatgcagtggcgtgctctcggctcactgcaacctctgcctcctgggttcaaacagttctcctccctcagcctcccgagtagctgggattacaggcgcccgccaccacgcccggctaatttttgtatttttagtagagacggggtttcaccatgttggccaggctgatcttgaactcttgaccccatgatctgaccgcctcggctcttgaccccatgatctgaccgcctcggcctcccaaagtgctgggattacaggcgtgagccaccaagctctaaactgtttattactgtgctttagcagtaacagtgtttgaaaatctgtgatgaatttttaaaaaatatattgcagaagtgatttatctagaattcttacaattagcaagaaaaggactgcacttaatgttttcgtcttcagtttcttgatgcggaaactctagtttgaaaatccggcaatcctatcaagtctaacaaaataaattatgttcataaagttgcttcatgtattagtctaatatttttgtagaactaaattttgaggctggggaaatgaatcgattgtaagatttatatcacattatttattataagcagaatgtgtcatattctgcttagcagataagcagatattgaagtatcggaaagaacataattagtcggatgtggtggtgtgtgcctgtagtcccagctacttgggacgctaaggagcgaggattgcttgagcccaggaggtcaaggctgcagtgttatgatcatgctactgcgctccaccttgggcaacagtgagaccctgtcttaaaaaataaaacatcaaaatgcagttacatccataaagtggctccacataatggtcacaatgtaagtaaagggcatgtgtgtgcaggcatttatatctgtaagtgaagacatgcagtgaatgtgagctgggctttgtgagtactggggctggttaagttccagctgagaaaggttggccccgggattgaataagtagctggccttaagtaagcacctcgcttttgctttagtgcaggagaggtcattgtagagactgggcctgatctcctggtcagtagcaaatcattggggagcccttggtttttaagctgattttatagtttgaaatatataggaaaaaacaaacaaaaaataatacattttaagagtagaattagggaaatgcatagtaagaaaacaaacatgcaattttaaaatttgaaaccgagcctggtgaggtggctcatgcctgtaatcccagcactttgggaggccgaggcaggtggatcacgaggtcaagatttcgagactagcctggccaatatggtgaaaccctgtctctgctaaaaattagccgggcatggtagagtgtgcctacagtgccagctacttgggaggctgaagcagaagaatcgcttgaacctggtaggcggcggttgcagggagaggagattgcgccactgcactccagcctgggtgacagagcgagattccatctcaaaaacaaataaaatttggaaccttttttgtaaactcttcaatgtcatagttttacagggtctcaaacttactttgcagattatatcagagaattgtgttttagagctgcaggggacctgagagttgggagtatatgttcatttcataggtgcaaagacaagtgggcagcagagctagagcaagacactcacttctgccctctgttccattttgtggcgtgcctctccacaaggggaactggagggaaaaacctggaatatttccatatgctaaaaatctgctgctgttgcctcaagttgtgaaggtaaagaagacaaaccaaatgattttttgctaattctgtgatatgctggttttgaacaaatgatggtcagattcttagaactagaatttatttttaacgataactttctaattaagaggctaaaagtgagaaagccatttttagaggatttcagctcattcacttctttgtaagcaaaggctagagcctcagttttttgaataatgtaaaaattgttgctgctattatttttactactcaagaggaaacatttttggctgggtgatttaatagagaagtatgctattgctaagtgattcaagttaggaatgtatacttgtatcagttttagatcagcctggggtaaacagcccaatgatatatcaggtagataactgaagagtgacacccaggaggtggatggttatgaattgaatggaaacggtgctgcaccagatagccaccaggtagctactatatcgtattcctgatgccagcatctgggggatgattgctcatttcaaataattcaaacaaattaaatgtaagccacagttctttgctatgttacagcaattatatccctttgatacagttgttacatggcaggtgaatacatttttttaagaaaaaaaaatttcaaactgggatcaaaaaaattaccctgaaaccgcatctaattgtctattgtcgctgattccaccgtggttgcagtgatgccattatcatgagagtattcaagttttaactctgtatgtgtgtgcctgcacatgcgtgagccagcataaagatgaaatgaatttatgtttttgtgcatatgctaatgagaccctgtgatgaagtggtaagcattcttgtactatagacctgggatctaatcatgactccgcaattaactggtttggtgatcttgggtgagataactaatgtctctgaacctcaagcttcttcatctgtgaatgaaattatcaactgccctgccaacctcaaatccaaatactctgaagttgatgggtattcagaagagcctctcatactataaagtagcagcatcactgcttggtttttaattttttttttttttttaattttgtgtgagtctttctctgttgccaaagcactggatcttggctcactgcaacctctgtctcccaggttcaagtgattctcctgcctcagcctcccgagtagctgggattacaggcgtgcacctccacacccggctaattgctgtattttagtagagacagggtttcaccatgttagccaggctggtctccaactcctgacctcaggtaatatgcctgcctcagcctcccaaagttctgggattacaggtgttagccactgcccccggcctgcgtcatctgctttctatcaacattttaaaatcgcttatgataggataaacaattaaataagcaaaacagcttttagagaatgagaaaagaaaaagaaagatgatgtatccatgtaggttcagctagtttttatgtgcatgagagtcactactaacattctggtagtttagaggatgtcactttgagctgaactatctagttatgtttatttgagaagtggaacctgagttgatattaacagctggtatgatttaatgaggtgaatgggaaggtggaggatgttccaggagaagggaaggtgcagcattgccagcaccatggtgatgggcaaggcttaggaaataggtacggatttagttagttggaatggcaaatgcatagatagaagtagtgggaatagatagagactacagaaagcagaccaggttagggctagattgtggtgggccttgaaggccagaatacatagtctgaattttattctgaaggttgtagggaatctttaaggcttggattatttgggggtgtcagaatgaactctttgtgcataaactgagaatgtatacaatatatatgggtttaaagtagacattggatgaagtgtgaagagtcaaactattatatacgtggctaaccctttaggaaaattttttgagtagtgatattttctcaaaatagtattaataaaaatatttatattgagttttctgtattttaaactccttaaagattttttaaattttgttttaactagaaacaagtctttgttttccttacctacaggttagtgtattcatcctgaaggattgagaacatgtggggctcatttgtttagctgtcagagcccaatttttagttagagaattgagcttttatttctatatgagctaaagacaattgaagagactcttggagaaaatcttaggaattcttgaattaatttgccttgaagaaaattttgtcccaatttcagagatcctttaaatatgttttaccaagtttgatgcgggcttttaaaatttaattgtattaatttttgtgtttattttaggtaaatgagagatatcttgacattctatccctagagagatacatatttgtgtatctttaaaagttaacacttccttacatagtgacattacactgagcaagatggattaatcctacagataacgtaataaccagtccatattcagatttctgtagtggatcccctgatattctttatagctggattgttcaaaccagaatcttactcaatactgctcattaaatctggttgttacgcctttttaaatctagaaccatctctttttttttttttttcaaatgacattgatttaacttgttcagggcttgttcctttatgccctgtgtatctattaacattggaagctagttctaaagtaggttcaagaatagcatcttccactggagtacttcataggtgctgctgtgtactttgttatcttacatcaggaggcacagtaactggctctgccatcagataaggaaagattgatacctggattagagtggtgatagatggatccttgtactttaaaggtagttttttttgttttgttttgttttgtttccccacttggaaccagaaggtgccccatcgaccaaaggtgccccgtcaacattcacacctggttttgaccagttttttgcctgaatcagtttcatcagagcttgcaccatgatgatactttaattctgccattctttctgcaattacttggcatcctttgaaaggtacagctttctgaccccaacacggaaatacattgcgattttgaagtgagtttctaatggggcaagccagatatatgctgctgcttattattacttggttctcaaagtaaagtgttggtttgctagttgcttcaaatggagaccaatgaattttttctctcttttctaatcatctttgtagactcatggatttcatagattcaatgtacttaagtcaactataattaattttgatgttaaaattattacaactttagccattgataattaaactggctcctgtgtctgttgaactgctgcttgctttctggggcacaaggcttcccttgtgccttgtctgccttgcctgttctggagctacacttggccatttctccaataggaatggtatgaaatacttgaatttaggtgttaaacatgttcattactctcaggatgtgattacttctgagccattttctatggacagtattgactttaaaattcattcattcatttttatattttcaattcaattttttaacgttactgttaattttatactcgtaccttttttttttttttttttttttgctggccacagctaaactaatgttgttcttgatggtgacatacttatttgctttattctacaatattaaggaaaatactttcaaaataacaaaattaataatattactaatagcagtaaaactatctttaaaatttttaaatttgttttagacatgttaccaataatatagccagtgacccatttttctggttgatgacaattattttccttttttggtgggggggtcctcattctgtgtatactaagttttaatttctactgaatcttgtttttgactttttgatgctgtcatttattagctgtgttcttttgttgtacttactgcttctattagcttttaccttatgctcagcagacatggaaaatacacatatattttaatgtcaggtgcgtgcgtgtgtgtgcctgcatgtgtgtgcgcgcgtgtgtgtgtgatggcaatatgatccagaaagataacttacaaggagatggttgtttatactagtgctttgtatcttaagcacgaagggtagggaaaaaagaatatgacaggcaaaatgtttcaatttagtgaattcttctgaataatatcagtaaaaatatatatagatctttaaagcttttaaagtcatatgaagtaggggaaacctcataggtagaaagtaagtcttaaaattgtatttcttagtagttgcaaaatctctagtgcaaacttgttgtcattaagaacttttagtagtaaggaacttatgttccagcagatggggatgttagtacacaaaagagagcactcagtgattaaaatgtgttgagaaataacccttttgccagaataggaaaatgttctcctttaaattgtaagggaagagttgctcaggaatgtgacaaataacagttacctaattgagtattttcattggcatgtgaaaaagttgtcatagttctttaaagaacttgtctttttaagagactatatgttggtatgttgaccatattaaatgtaactagtttagtacatcagattgattgcagctattttctgaaatagtttctgcctttacaactcagttgtttgaagggtttttgttttggtgggtgactgagtcacatatattgagaggtatcctgtttgtacgttttctttgtaattataaagtctttaggcagtttatttctgtttattaaaataaatcagaagaaaatgtgtcatagtttactatatgttatatgaagagaaagttcttttggggatcatagttttatcatagtaataaaaaattatcagcagtaaaaaagatagtcttatctcacttttattatagtttatagcattacgacatactgttagcttttttagtaggtaaatactacatagattgctttaacatatgctttgcaattgttgaaatactgctcatttaagttccttcttagatgtgattcagaagtgtactttaatgtatttaagttatattttcctagttcagttatattgagctttttttttttttaaactgtcaaggcaatttaaaatactcttgccttcagtgacttgaaattgaactctgcacaggagagaagaatatgtcttgtttctatatagagaaccaaggaggaagagattgactttgccacctttgtaactgataataacttgcattttagtccctgctccccagccccacttttttccttttctgttattcctaaaatgtagagaattggagatcgatccacagattttcagttcatctttggcagtagcatggtttgtaacttttttcattcctggaagaagcagtggtgagggcacagagatagcgtagcacattgtctttgaaccttaatgggaattacttcttttcagggaaatatagcaatggccaattttgtctatacattttaagattgtttcttatagttgttagagattttatgagaagcttgaatttctttcagtaatcctaaagaactgttataaagaacttatttatcagaagaaatattccttattgggaaaaactaaaatatatcaattaaaaagttaaaagtactcatcatgcactgatagctgctcttaatgtttccttgtagtccccccccaccagtgtttatggatgtagcaaaattggaattacggtttttaaaaaaaattatatcatgagcaaaatttttccttgccatttcatattctttgcaaatataatgtttatagtaatatatttcatgctgtcgaggtatattataatttacttaactaatctgttggacttgccactttgctttcaggaaatgtgtgtaatgatagcattaagtggctttagaagttacttttttaaaagccttaagttacaaaatactgtaactgggaattatgaataccaaactcttatttttgcaatgcagttaatctgaaataagcattttatgttgcattgcagtagaaactggttgttaggatgcaacgtgattttcgaataatgtcagagttgcatatttcatgtattagtttttagtgacttaacatacttaattgaaacttttcattctattctaggctgtttggttgtatgctattaatatgtgtgcgatgttatgagggacacactaaagcttcaaattcattccttcaagttatctcagtagttggaaagaatatgaaaataagagtaacaaaggaaatagaaacataccaagaagactaaagactggtgctaaagagggtgtttttggctgaggaggctatggaatgtttcaggagaggaggtaaaatttcatctggctcttaaaggacaggtaggattgaagtggagaacaggtaagggagtggcgttctagacacagggaacggtgttcttgaatgtgggaacattctgagtaggaaggtgtaaataattctctattagagagagctttttatacctttggtcttagctttttcctttatctgcctccatatttctgtttttagtccagattttcttatctctatcctgtacaggcattacattatagagtgatatattaatgtggtagattgctgtgattgctgctgtccttctcttcccttcattttcagatgttcttttttcttgactttgactctctttaggtttttggagaagaggggtatcttactgcctaacttttaattttaactattgtttatctgtatgcttaatttggctttttattttttttgttttcctagtgcatttggattttacttagcttttattatgaagccatgtgtttcagtttttttctgtatgtgtaggtgattgggcttatgaattgatcaggagcatggaggaataggtacatctggattagcgagtgtgtgaattcttgagctgatgggcctaagctctaaaggatagattagttgtcagcatattctggtctagatagtatggcatagtttttaccagtatgctttcttttccccatcttcccagtttgctttttactctaatggcttgaaaaagtataggttaggttggaagtgagagaacaaaaatctgctaatttaactctgaacaaggaaggctttaggctgatgtttgaaaagtgtgttccatggaatactggtctcctgaggtagtctgagaaaagaagggtcctgtagtccaggaagttctgcatactccttttgtgaattcaggatgtgttgccatattaagtctccaggatttgcagtcaagaaagttaacttggtttaactgagcattttctgaaattacttggttaaggaaatacggtttttctttcttttattcttggtactagttctgaggatatgttaagggaaattttaggggattgttaaagatctgtggatccttgggtggaggcaggtttaaacaataattgtttgggaatcttaattttgaatgagagtgctggctcaagtcaaatcaaagtaccccttggaaaaaaaaaagttatattattccacttaggttgggcttcaggtttcaattgaaaggaagcaagaaaactgtccttgtctggctttcattaaataacaattcagtcaaatgatttcagtaatgaattttgtctaactcaaatgcatttgttatttaaataaaaattaagatgtgctgttttttaaaaatgtaattctctaaataaaaaaaattaacatagaatcctgccagcttaaacatcaaactgaaacttactttaaaataggtatatacagagaaatatgctcatgttgtaactcatgcctggtttacatctacattttttaaatttgggaatgactgaattgtgaggtgaagaggaattagtaaattttggaaagaaaaatacttatctttgttaggtcatttaaacaaacattaagatgcaattttgtgagatctgtcagtaacaccggttgttttctgtgaacttagattttaatctattaatagaatatattatctcccctcattcagttatatcataaagttttggtgacctttgtagcctttataaaagggaagtctaagggtggatagtagaatagcattttatttggaaggccctaaagatttttgtaaaaaaaaaaaaacaaaaaactgttcttattaaaaaaaaaaaaaaaccctgtaattctgcaattttaaagcgggtgtggatttgagagatcgtagacccattcttcattatatatgtaaatgctgttcctttacaaaggatatgaatacattttatattttggaaactgctggtttcaggcatgttagatcatttggctcttgggacagaaatatatttaagttacattattaacaagtaagagtacctttgggcctgatcccctctaagcagaataatgtcatgactgataattgtgtaatgtggctaccttctgttgtgaatagtcttaattaatttaattctgttttgttgctggaagtatctacccagggtattttaaattcttcctccaaataagaatacaatcaagcatctaatgcacagtcatattatcattaaattgatgttaaaccaaagacaaaggctctcctaggtagtgtccattagcattttccagcagggtgaatctaggtctaggaacaattcactgaatatttgcctaagggttttcactttccatgttttacacaatataaataatttaaaatcccccccctttttttttttttaaagagatggggtttcaccctgtctaggctagagggcagtggtgctatcatagctcactgcatcctctaactcctgggctcaagcgatcctcctgcctcagcctccagagaggtaggactgcaggggtgagccaccatgcctggataattaaaaaaaattttttttttggtaagagacagggtctcacgatattgcccagcctggtcttaaacttaaggcctcaagtgatcctcctgtgtcaggtgtcagccagtaatttaaaatgttttgttaagagtagtctctctctttccccactttgttatagatctgagtcatttgctttggaataatgtgataaaagtctaagataaaggattgctagactaatatttagacatgtttgtgttgatgttctgtacaggttgtagttttataggctagaatagactaaattttgaagggtgattagttaagaatagactaaattttgaagggtgatctgaaaagactttatattgttcttttgtaaatcttgagtaaaagaaaataaccaaacagggtagtgagtagagagataaatgaatcccttaagagaatgatagtaataaaggcaggtggaagtaagatcagagttagaaaatcttagatttgttttaggttataggaaaattgatttattttacatgttggtaaaaggcacaagaggcttctttttacattttactttatcaaagtgaaactttttcatttgatttttaaattggaacacattaactgaatggcataggatatatcatagtgatgttgtttaggtacatggtaactgcagataggtctcaagttgaccacatttgaatgttacattattactttgtggatatttaaagacagatggcttgaagcctgagaagggggaaggagtgaaagtataggagcaagtggtggtaatttaagaagatcctcaagtagaagtctgattttgtgatttcagagtctctttaattgttaatgttactattattaaataacaggtacatatatcctaacagtataaatatgaaccagaaaaatagtataagaatgaaccacaggccgggcacggtggctcatgcctgtaatcccagcattttgggagaccgaggtgggcagatcacgaggtcaggagtttgaggccagcctggccaacatagtgaaatcccatctctactaaaaatatacaaaaattagccgggtgtggtggcacgtgcctgtagtcccagctactggggaggctgaggtgggagaatcgcttgaacctgggaggcagaggttgcagtgagctgagaccacgccattgcactccagcctgggcaacagagtgagactcctctcataaaaaaaaaagaatgaaccacgaaaggtagcatgccttgcacttttaaaatgctacctataaggttaaatattttgttatgaacttaaaatgtgtacatacacatttatataactcaacaattgaaatgaaagtttcatgaaataatacttgtctgtactgcctgtgatgcagtatactatttttctattctgtttcatttttaaaaaggttggttgtgattgataatattgatttagtggcttgtgtgctgtgcagtcttagcaaaaccgatgtcgattcctgctgtaatttagttttcaacaaacttttttttttaatccagctctttgctgggtgctggggggatacaaagatggataagacatagtctagtgctcaaggagccacacaatggcatggagagtaatgaaaatagaagctgcaatgctgtaactgccctaacagaggcatgcccagcctgagatggaaggggccacatcatttcctagcaggaagatggcagtttcttctaggttcacagattactactgcgtataatctgataatccctcttatgacgggcttaccttgatgggaaagttagttttttacctagattttataaaaactaaacaataatcaagtttacttgaaaataagatatttttgaacttttagcttactggccaagtttgttaaaaaataaatattaatcttggcactttgggaggctgaggcgggcggatcatgaggtcaggagatcgagaccatcctggctaacacagtgaaaccccctctctactaaaaatacaaaaaattagccgggcgtggtggtgggcgcctgtaatcccagctacttgggatgttgaggcaggaaaatggtgtgaacccaggaggcggagcttgcagtgagccaggatcgtgccactgcactccagcctgggcaacagtgtgagactctcaaaaaaaaaattaataaataagataaatgttaattatatagataatctttaaaaaaattaaattttacaaatgagtaatattttcctaaatatgtcataggaactagctttaatattattattggagaaatacttctttcctgactttttcccccctcagtattgtgacttattaagaaaggtaaagtcaggtagaagtttaatataaaaatatatttgattatttgtacagatggtaaattaaactgtaaaataaaccattaacttttaaataatggaataaaagatgggtacttaattatccaacacttaaaaatgatttttttaaaaaattgcaacttgtgtatattctgtatattgactttttatctcacagtgaattcacaataatactgaatctagacgttaatagattagttgcatattatccaaaaaacataaagcatgacatttctatagaatttagtttctgtaagttacgcaattgttacaggtttttcctgtgaaggataggctgctacctcaggttgaagaagctaatgttggagtgaatgtggtggttgccttagaatgattttgccggcagcagtgaaaaatgttttccttatagttcttgtgcagcaggccatggagtaaagcacatttttataataaaggtgatgaatttaatcgcaaactggcagcctaatggaaattgcagaccttgatactgggagaaaattgcctataaagcaactcttgagagaacaggctttaaatttatccacccattttgacattgaggagaacattggaatcatagggtattttgcttggcctgcttagttcagatgaatgacacttgagtattctatttaagtgttagagatggtttaaagttaagttttatacattaaagcctttagcacatgcatttttgtattttataaagtatttaaaattttgctggtttttaacattttagtagatgatatgcctaatgaaatccatttgccacgtttctagtcatatgccgtgtatttcatgtttctgctgtatatatgaggaactgcaatcttaaaggatatagaatattgtgggcttataattaacactactgacagaatgtttgtcatataaatgatcagtctttactattttctattgtatttaagccatttatattataatatttaaacacagaatggtagaaaatttctattacaggaaaatctgggtttttgtcattttttactctaagtgactaatgtttgtaatttcttaggaataaccaaacccttgattcagtacacactatttaaagtgtttaatccagaatttaggtgcattgtagtgtgtattttgagatgcctgttctgtcccgcagtatacatgcttgttaacagatagctaatgtccaagttcagagaattatttgtggctattggaaacatttacccatccaagcaaggtaaatgtttaaaatgtagaaatgctgatgtaaaatataaaaataacatttctcattatacttattgaaactactggggtttaaaggtaaagaagtgttaacttctagaaggttattcgattttgcttccatacacaaccctgattcttttgactgtagttttgggcagcatggtacattacataataagggtatagctgtggtagatctttgttctctttaggtatagaattggagaagtttaagtttaaagcaagtatgagagcttaatattttgatggagaaagcaagaaaaacgttttacaaattctctattcagggaacaacttactgaggtggtcatgagactgaaggtatgaaaaggaagaaatggcaaggtgcggtggctcacacctgtaatcccagcactttgggaggccgaggtgggctgatcacttgaggccaggagttcaagaccagccaggccaacatggtgaaactccatctctactaaaactacaaaaattagctgggcgtggtggtgtgtgcctgtagcaggagaatcttttgaacctgggaggccgaggttgcagtgagccaagatcactccattgctttcaagcctgggcgacagagcgagactccgtctcaaaaaaaaaaaaaaaaaaaaaaaagggaagaagaaatagaagtattccttttcttgctaaagcaagaaccagtaaattgtatatttttcattgaaagtagttccatctaaattaagagcctgactttttggagaatgattacattcataggagaagagcatgtaatgttggagatacatttgaatgtttagccatctctcaatttccatggagaggagagttcaaaataaatcaactctttaattcccttatcggtgacatagatacttggtcatttgttttatttggctgaaggaagctgtggcaagttgagaattcagaggtaaagcctttgtgagagagatgatgtagtttaattattttaactctagttctcctgatccaggaaagctttatttttactttcagatgaaaattaaaatttgttgcaatttaacgtgtaacacgaagctagaataaggtatatacataagctatatatgtatataatttaaatgatacaagtgatgtatgtatacatatagtacttatgttaaaattttactgtttttctgtaacaggctataaatttagtgtatcgattatcaaagtataattagctgaatataattatttgtttatgagatgatactaaattcagttcccatagatactggtggtgatttactttttaaaaagagtttttcttgttatgtgcttaaatccacacccgaaatgtagccataatttagttcaagattgtttatgccacagtctggaaaacacctgaagtaattgagatttttgagtggttgtgaatggattttagaatcatgtgttgaacagtgacatcactaaattagccatagtaatgttactgtttcacattgagggtttcaggtgtgatgcttttcagttttttgtttttgtttagataactattttagggtttgagttatagttatgcaaatttacattacggtaatgcaaatataccttccaaacttgtgtcaatatgtattagacgctaaaatgccctcccctcccatctctgtttccctcaaattattcatttgtggttaaactaattttaaactccggaaaagtggttaagccaaaaaaggtcagatcctggaagaaaaagctctgaccttttaaaaagagtgttggaaaagtatttgacggtcattttcataagctaaatgtactgtgaggtttgtgtttgagtagcttttaaggttttctggattatgtggttgaattttaaggaggaacttagtaaaaatgagttgggaaaattaacctgttacattctaccttccttttgctatgtatagtagatctacatgtgagaagtcatttgcaaacagcatttgttaggtgtcttttctaagtattttttatgcctacaaagtctgggaaaagaccattttcagatttcagataatatttcagataaataatgatcagatcagtagatactgtctttcagatctatcagaacacagtatttccagaatataattttacatcacagtcatcatttataatgacattgatgaccagtactattattattttaaagagaaagatatatatacacatacacataaagtcatgcattgcttaaagacagtgatagattctgataaatgcatcattatgctatttccttttgcgaacatcatagggtgtacttgcataaatctagatggtatagcctactacacacctcagctgtatggtatagccttttttgttcctaggctgcaaacctgtacagcatgctactgtactgaatactgtaggcagttataacacaatggtatttgtgtaaacgtagaaacattctaaacatagaaaaggtacagtaaaaatgtggtataaaagataaaaaatggtatacctgtataaagcacttaccataaatggggcttgcaggactggaagttgctctcggtgagtcagtgagtgagtggtgagtgaatgtgtgaaagtcctaggatactactgtggatttaataaacattgtattcttaggctgccctgaatttataaaagatatttttcttaagtaataaattaaccttaacatactataactttataaacttctaaattttttaaacctttgactacaattacagtttaaaatacaaatacattatacagctgtacagaaatattttctttatatccttattctataagctcttttctgttttcgaacttttctatttaatttttacttctgagtcctttttgttgaagacaaacacacacattaacctaggcctgcacagggtccagatcatcagtttcatcttctttcacctccacagcttggcccactgccaggtcttcatgggcaagggctgtatggcttaccagtgtgtctccagcacagtgtctgataccacagaaagataggaactactgcattaataatagcagattcttgagcatgtattacatgacagacacctacaaatatttgttgttcaagcgaaagaatttattctatcaaactcagaattttcgctctagaataatccttcgtggtttttttttgttttttttttttttcgggggggtgggggacggagtctcactctgttgcccaggctggattgcagtggcacgatctcggctcaatgcaccctccgcctcctggtttcaagtgattctcctgcctcagtctcccgagtagctgggattacaggtgcccgccaccacacatggctaatttttttttttgtattcttagtagagatggggtttcaccgtgttggccaggctgttctcaaactgctgacctcaggtgatccacttatctcggcctcccaaagtgttgagattacaggcatgagccaccgcgtcctgaatcctttttttttttttttttgaaacagagtctcactctgttgcccaggctggagtacagtggcttggctcactgcaacctccatctccagggtgtgagcaattctcatgtctcagcctcccgagtagcaggtaatacaagtgtgtgccaccacgcccagctaatttgtgtatttttagtaaagattgagttttgccatgttgaccaggctgatctcgaactcctgatctcaagtgatctgcctgccttggcctcccaaagtgctggaattacagacgtgagctactgtgcctggcctagaataatcttagaagtcctcatggatgagtaaatatggatggtgaaaagcttaaatgagaatgtcttgtctgattttcattccacttttaatttgaatataccatttcctttcccccctcattgtatatgtctctacttttttgttctttactttattcatagttctaatttctactcactgccccatcttttccttcttctctatctagctcttaccatctgtcatcactgcttttcccactatcatgatcactcactctagcagcaaccaaatttaactttggggatggagcagtagtgctggagaggccaaatggtatgagtaaaagaatacagcttttggagtcagctagattttcatctttatgtggtctttggtgaaagtacttaatccccaaatctctctttcctaactatgaaatgaaggtgaaaatattacttacctgtaagggaatctacctgataataatggaataaaatgctgacttccaccacagagttcttggggaggctttttatgtggaaagacattagacttcattactctgaattctggatttgtatctcctagccatatagactgaatgactgtagaatccaacataatgcttttaatattggcataacttccttagtttaagttatatgatgagatgtagaaactcaataaaaggtaaaattattctttgtgttatgaagtatgtttagaggtttcttttaagaggtcttattttgctactctgcttcaactatagtttttgttcatttagtttgttatagaactgggaccatgtctgtatttgcacatgactatattcctagggccttggccagtgcctggtacagagtaggtgtaaaatacatagttgttgaatgcatatacgaaaaaaatcattatattgtatcattggtaagacagttttttttttttaaaacaggttatactttattcaggtcagttcaattttgtaaagtttttacttttaggaaattaaaaagcttttattttattatgttctgaatatatttttactaaatatactttgagtacagggttaattaggactgtgcaggctatgaatatagggtttatgataaagctcagtaggagtggatgattgcagtccttttgtgcaatcctggcaggagcagccttttccttattggctcggtttttttcttaaagccaagactaagcacatatttagatgcctgtatattttattttctcatctgatgtaagatacactggaagaatttagcattgatgtaatgaacatatgttattagcaaagtgttctaaacttctcaagtccagaataaagagaccaagccatttgcagaagagcactgtgcatttatattactttaaagggaagaggagtaagctagctagaattgtcaagcagatgccatattgatgcttgagtgaagttacaagaaatatttttggagctttgcgtgtttttgtgctaatagtcctaatatttgttcaaaaggtgttttttctccaaggatgtagatgttacaaatatagcaaaaggcaaaaacaaagctatctgccctctcagctaacattctaatgtcaacaggcaataatcaataaacaagtacagtaatgtattaggaaatatgaattatagaaataaaattgaagggtaaaggggatctggagtgttcctatggattgaggcaagttgctgtttaaaaataggaagatcaaggttggactccttgaaaaactggagcagaaatctgaaggaggtgttagtgtgagccatactgctctttggggaaaagctttccaaggcagggaaagagttactgcaaaaccttgagggcagggctagcaattccttgtgtggacttgtagccagggacggaggttaggttggttaaggacatttgatcagaagggcaaaaaaggtgagggcaaggggagcctgtgtggatgctgtaggctattgtttatctttgtaaggacctgggcttttataccaactgagatgggaaatcattagagcagtggttctgggcatccttttagggaatctgtgaaatcagactatctttgtgataataagatgttatttgccattttcaccaccatttacatacgaatgtacagtggagttttccagaggctgcgtgctatgtgatattgcaacagattgaattcaagagaagagagaatctagctgtctttattaaaacagacatttaaaagattgcaaaagtataaaactgaccttttcagtaatttgtttagttggaaaataggttattttctgtaaaatgtgcatttttggttaatatataataagtttactagtattttaaaatgaaaaaataatttaaacatttttagttttaatttctagcgtggtaagttttattagacataactttcatgaacagggatctctttgggctcctccaattaatttttagagagtggagtcctgaaaccaaaaagtttgaacagaggagtgacatctcacttggatttcagcaggctaactccaaagaataaagaatagactgaccaaggtagtggtggaagcaggtagaccggttaggttaagattaggtaggaaatgattgtggttagagctgtaatgttagggcttgtgatggtgaagtgaaattggggatatagtctgaaagttgagtacacagtatttgctagtggatggaatatgaagtgtgagaatggacttgacattgtgtcattgcccgagatcaggaggaacaaattttggggaaggcttaggagtttagtcttgaatgtatcagataggttgagaagggagttggtgataggatttcattgtggagggttggtctggaatgtccattaccagggtttttgttggattgtattagtaatatatattttttaaatatagtatttagcttctaatcagttatacttttacaatctcaacacagagggctgtattctgcattgaaaaactgattaaatttgctttccaagtatgttattatatgatagaatgtacacttgaagaggcagtaaaaaagtaataaatgtagatttgccagtagcatgacatgacttagattttctgaatctttgtgaagtaaaccaactgtggtttaattaaaggagatcatattgcttaccatattaaaataatgttttcaataccaattactttgacatttgaaggcactgtgtaatatgttggtcttgttacagaccaagatatttttgctgaattttatttttcgaattcaatgtcagtgcttgttgtagttccttttggaatattgtgtatagtagattgtttcttaagcctttaaaaaactcttcaccgggtacagtggctcacgcctgtaatcccagcactttgggaggccaaggcgggtggattacgaggtcaggagttcaaaaccagcctggccaagatggtgaaatgctgtctctgctaaaaatacaaaaattagtcggtgtggtggcgggtgcctgtattcccagctacttgggagactgaggcagataatggcttgaatccgggaggcagaggttgcagtgagccaagattgcgccactacattccagcctgggcgagactccgtctcaaaacaataacaacaacaacaacaacaactcctcttggctttttcataatatgagagaattctcttgcaacacctgtgaatgtcttttgacatgtattttctttcctaaaaatgtcatgaagtgacagacatgtatttgctttgtttatggtattaaggtgatactgaggtaaacctatgctacatgattataaaccttaggttctttctgtattgtacttaggtgaaattttgaatacaatcgaaaaggttaattaaaaatcaaataaattattacctaggaaaaagcaatttacccctacctcctacacagacgtaactccttcagaatttttggggcatcggtttcattttcagtctgatttaccaaattccttttaaagccctaagggatttggagcttcaagagggcgaaatacataggtacagacctttccccacttcttcaagagcaagtgtagaggaatctaattacatgaggatttggtgttttccgaggatgtaatttaaagtaaattctggtggccagtagtagtttaagacattttagaatatatagttctggcaggagtaggatagtctggcctggagttctcaaccagtcattgagtatatacagcccttgcctgtagggggtcagtacagaaggagcacaaaatggaattctctgtaagaagacaaagagatgcattttagggcagatggaagccataaatgtgatgtggtctaatgtgctcatttcgcagatgaagaaaatgagacccagaaggttcagtttgaaggcacacagctcagctaaatcatgctggcgaaacaggagtaaaatccaggttgtgtaaactcaaggccagtgctttttgccttaccacatgtattaggaagataggctttttatagaaaggtcattgttttggattgtaatctttctccaccttctttaaggaaagttcaaagtgtgtgtgttttcttttaaagcagtatattaaagaaaatctaaaacgtatagataaaatttacaaagcttttgcagggaaagtcatctgtagttgaggttaacattagatcttttatctgtggatatttattttggagaagagtaacgaatatattaagcacttatatttaacatatattttggatgattagtaatgattgcttatttgaagaaagcaaatatgtataattaaaattttaacaacattatttaaactgtagaagataccattttgagtgatttttttccctcagttttctttatcttttttcacagctttcatactttgtcacattatttccccccttccctcattagaataaataaccccaaagtccaaagcaaacactttttaattattattattattatttttgagacagggtcctgctctgtcacccaggcgagtgcagcggagtgatcatggaccactgcagcctctacttcctgggctcaagcgatctttccacctcagtcttgagtagctgggactacaggcacaccaccacacctggctaatttttgtggagatgggatttgccatgttgcccaggctcactttttaaattgtaattctttattttgaaataaatttagatttacataacagtggaaaaaaataatgtggatgttaactcatataatcatagtatagttatgggaagcaggaaatgagtattgatacagtgctatcactaatctgcaaatcttactcaaattttacctgttttcctcctcactctgttggtttttctggtccaggttttcctactctgttggtttttctggtccaggttttcctactctgttggtttttctggtccaggattccacattgtatttagtagtgatgtctgtttcgtttcctccaatctgtggccatttcacattctttcatgaccttgacacttttgaagaatgctagttattttataaaaatgttcttgaatttgggtttgtttgatgtgttctcatgattataatgaggaccatttttggcaaaacaatcacacacaagcgctgttgtgcccatctcagtggatcatgctgtggagtatatgtcttttttttttttttttttagttggagtcttgctccgttgcccaggctggagtgcaggggcaccatctcggctcactccaggctccgcctcccgggttcatgccattctcctacctcagcctcttgagtagctgggactacaggcgcccgccaccacgcccagctaattttttgtatttttagtagagaagggatttcactgtgttagccaggatggtctcgatctcctgacctcctcatccgtccacctcggcctcccaaagtgctgggattacaggcgtgagccatcgagcccgaccgttgtggggtatatgtcttaatactggtaatattaactttgattagttggttaaggcgatgtctgtcagatttctccactgtagtttctccttttttccttagtaattaataaatgccttacaggggagatactctgaaaccgtacagctatcctttcatatttttgctaactaatttagcattcattgaatgatttttgtttgcattgatttttactaattaaaattctttaaggaagagctgtcccctttcccccttgtatttatttattcagttatttatatcaatcttttcttatgggttgtaattcattactatcactatataagtaaaaacttttaagaaaagtttctgaaaagttaatacattgagataattcaaaattcagagactcgtaagagtacattttcttctatccctgttatcttgggtacccgtttccattgctaagagtttatttttattctttcagaaatattaaaggattgggaaaagagttgttaataataattgctggattctcaggtatttctttttacctggattctgatgatatcaaactaacttgctgttgcatcttcttcggatattcattaaaatgttacttaactagttcgccattagatttaaatttacatttcagtacagtgactattatatatagatggggactggcttcccctgagtatcctaagaaacgacatgaccagaagaccacattttctattaaataaataatagttaaatattaacgtgtaaaagtaaacaggtttaaaagtaaactcttttttggtaagttgaaacaaaagtcagtttaaatgagaaaggctgcctatccaattaagtaactggtttttcaaaagtgaatgaaggccctccccaccaagtcccccgctctgttctgttcttttcagtgacctattttactttctgtgtctactggcagtatccgtttattcattcaggatgtcactttaggaacctagacctggagttcatctacagaactgtgttctgttaaaatggagtgaaagaaaagggctaaaaagactttctttcacacgctattaaaacagtgaacatactggtctacacttattatagtacagccagcaatacatcaaaaggtggcttattccattttatttccattctctaattaccgtttcttaaaatgaattttaagagtttcttatgccaggaaatcctctatgaaactcttaagtaaagctggttagactagctgtgacttggtccagtttcttttatttttttgatttaccttttctttatttttattgatagatattttacatatttatgaggtgcacgtgattttttttttttttttttttgctacatacatagaatgtgtaatgattaagtcagagtatttgaggtctccatcaccttgagtatttattatttctgtatgttggggataattcaagttctctcttctagctactttgaaatatacaatgtattagttaactgtagtcactctaatctgctgttgaacagtaaaattcatacctttatctaattatatgtttgtacctattaacatacttctcttcatctcttctcctactcatccatccttcccagcctctggtatctataattctactctgcctttatgagctaacttttgtagcttccctgtatgtgtgattgaggacataacgatatttgttaattctttaatcactgagcattagttgttttttctttttattttgaggggacagtaaaaagggtattgtaatatatcctccttcagattctggtgaagaccagttgagtcatgtaaaaaataactagatcgctttatttttagagttgggaggcaatgaattataacatctttattatgctactgtttttatataggcagtcccatgcttgcagtgttttgatgtaagcttttctgctttctactctcctaataggtgattattgtaagaaaaatttatataataacatgaaagcgaaatagtcctcgtaaattcatctcccagagatgattactgttaatagttgtatcttttttgactttgttgtgtctaccaaaaaaatgtatacttaaatataaatttgatcatacagtagaggttcttttctataaccccaggaacgtgtgtgcaacttactgttaggtacttctgtaatacagaactgctgctgagaacaatcaggaaaatcgaattaacattgttacaaagtttttgctgttttgtatttttgcatgtgaaatttatcgccagttgtggacaattgttagttttggtagtacaaagaggagttatgattaatttaattttgtagtttttgtttttggacttaggattgtgaagtacagagtacaatttaacccttggaataaggttccatctagggaattactaatagcttgggttttttttttttttttcttgccagtttgaaagcagttactttgaaattaaatcagatttatttggttgttagagtaagcaaacatatttcacttaatagtctgtactctaggctaggcgcagtggctcacgcctgtaatcccagcactttgtgaggccaaggcgggtggatcacctgaggtcaggagttcgagaccagcctggccgacatggtgaaaccccgtgtctactaaaaaaaaaaataataataaattagctgaccatggtggcgggcacctgtaatcccagctactcggggaggccgaggcaggagaatcgcttgaacccaggaggcggaggttgcagtgagctaagattgtgccattgcactccagccttggtgaaaagagtgaaactccatctcaaaaataaataagtaaataaataatactctagtaacttgctttttaatctagttgctctctgtaccttgtgaacttggcctcttaaaaagagcacagtgaagttaaattccatgggtggttctcagctcaaaaataactttaaaactttctctgtatttagtcaagccttaattaaagtttatttctttttacagaagagattgttgttaaccctaaattcataaggttacacaccagccacctctttatgaagtgacagttcttcagttttaaatagattactaatattattgttttaagatttaatgagtattatctaaataaaaacgagtaatttgttattaagacctaaaataactaaatcttactttgctgtttgtgttagtgagctactttaatgtctagcaagaggtagggattgcagacagtgtggaaatactggagcctatttaagcttcagatgaaagcagtcattttaacttacctcataaaatgtattttatgtatatcaaattatgtatgtgtttatatatacttgtcgttttactgacaactaagattttccataagttaatggaaaatgttaaaaagcacagttatggtcaaatgacacagtgaccttttcattcctttattagctcctgctctagtacaatgataaggcagattttgttgatggattcaaatgtacaaagaaacagcagatagatacccagtgaaaaaatatatatgtctataacatcagcattgcaagttgagcaattgaatcagctaccacaacactaagtataagatgcattttatgtgagtttttcttcagtgttttaaaactgttttgtttttttacaaatcctgaaagtaattctttggtgcattttggctttgaattttacttttcattaatattttgttgcttatgattgagttagtaaatagtttttgtgtttcatttcctaattttgattttcttagtttaaatttgctgaaaaatttctaaaccagaaagtaatatagagctgtatttgattctttggctttccaacattgcagtattgattttatacacagccttagctatgtatttatatattttatgaaatgactgctcaatgctgtaatttagatttctcaccccatatttttttattctcttaacagtttttcctgttcttaattccagtgttctagttttccagtgattgatctgttagttaaatccaataattcatatatatgtaattggatttaacatatgtgtgtataacatatatgtataacatatatatacacacacatatatatgtatatatgtgtatatatatatgtatttcttttttgagatggagtctcaccctgtcacccagactgtagtgcagtggcatgatctcagcttactgcagcctctgtctcccgagtttaagcaattctcctgcctcagcctcccgagtagctgggatgacaggtgcctgccaccacacctggccaatttttgtatttttagtagagatggggttttgccatgttggccaggctggtcttgaactcctaacttcaagtgatctgcccacctcggcctcccaaattgttgggattacaggcgtgatccaccacaaccggcccagtaattcagatattaaaaggatatgtacaaaagtagcagagtgcacgtacaataatttggatacagtaaaagagtagtggtaatggaaaagccaaagacaaacatgagctgaggctgttgaaacatgaaacctaagaattactttaaaaccttttagtgaaatccatagttgggtgaattaaggggaaagaaaaaagaataaaggtcacataaaacagaactgtgcagtgacatcggagcagaattaactgacagttgagccttagtttggaaaagaaaaaaaatcaagataattaaagcagagaaatgtgacgaggcagtaagtagtaacaggttttcaggcctaaacaaaaaatagttttcagcgtagtgaaattcgaaaaaaaaaaagtaaattcaaaaaattgtaggaaatgggaggagcctaaatgctgtaaaggcaaatactccccaaagctgaaaaatgtatatgctaaatttgatggcataacctgtagattcctaagcagattatttcctatttaaactggtggctccagaaggaggttctggtcccattgtagcttgggatttcatcaagtagtagataaagatgtgcctgtattttgggatctgggccaaagaaatctgtgctctataaaattacggttggattcttgactcggagactattcatccttaaagaataaagaatatcagctgatagattaatatcagtctgctgaagggatatgtgtagcagaaaataaccaggaaaaaaattgaaatcttctgttggtgtctaaacaaacagttgtggaattatggaatggtagagacttgtcttaacaccattagcaaaatgtcagcagtgtgctgtgtttgccaaggaagtaaagatattcttaaacatcatcacctcttaaacagtgattatggatggggcagagtttgggactagaatttgatagcttcagttggcttatccattgatcattatggaatgttgtgtacagtatagggttttgcatattaaaagggacctagacagatcagagtgcatctaaacaagtgggagggtataaaaccatgtcattggtttagggaagaggacacttagatattttagaatttttccaatgtttatggggctgctgagttgtggccaatggtagaaattttaggagagcagattttggtttattaaaacaaatttataatatttaagatctttagagatgtctaaaaatttctcttgatactggggatatttagatagaaaatacatgcctggggttcatgttgggagattttttgtactatgcgtgattaagcaaacggttctgaacttcagttctctgaacaactgctgcgggttgttgaaggtagtgcagttggtggtggggcatttgagtgttgtaatgtttgatacagcaaaatagtgtgtacagcatattagttatgaagcattcctatgtttcatgagaacacctgtgaagctattacttacaaaaggactaaagcatttcccaaacccgtactcgttgcatgtttccatagtagtttggctataattgtatcctcctgctaggataacattcccagaagctctgattgccacgacttacaaatggaaagttttaaagacaaaacttttaaaaacaggattatggagaaaaagaataaatggggctcttgcatagtaagattggaaaccagtggatttagttcattcattgaataagtatatgaagcacagacacagagaggttgtaagaaagagacttgtctaaaatcacagttactgttagaactggaatcagaacttgctctgactcgagtgttctgaataacaccagaatgctgatgattttctacttttttcccctgtttataaaggtagtacatagttggccaaactcaacagtgagtaagatttttaagtccttgaggactggaactatgtcttagttaccttttcattcccatcattactatcttatacattaatttgtgttctgttatgaaattgagtgatatatcttagagactgaaaaaaatcgtggtagaaagacttcttatctgtcttccttattagaataagttatttgagagctggaaccatgacttgtttaactttaatgctccagaaacctagctctttcttgcctttgtttacccccaccaagtatttattgagggccagctgtgttccaggcactgttcaaggacctgcggacacactgggtaacagaatctcatggaattttgtgttattaatcaaggaatcacataggtatttataaaaatacaacttaagtggtaaatggcttgtatcatctaaccagatagatgcttatatatgaggactgtttgttttatacattttctttttatttatttttttagacagttttttgctcttgttgcccgggctggagtgcaatggcaccatctcggctcactgaaatctccgcctcctgagtacaagcgattctcctgcctcagcctcctgagtagctgggattacaggcgtctgccaccatgcccagctaatttttgtatttttagtagagacggggtttcactatgttggctaggctgctcttgaactcctgacctcaagtggtctgcctgccttggcctcccaaagtgctgggattacaggcatgagccactgcgcccggcacgtttatttaattttttaatctagtcattttatctgaattttctgataacttgcaatagattcttttgttttttttttttctaagtttgataaatttgtttatctggaaaatcagtattttttcttccctagatttattatattactatggttacttataatagtagatttttcaatattgaactattcttgcactcagggtataaattctactatatcttagtgcatttttctttttctatttatttcagatgtttgcatctatatttttaagcaaattttatctatagttttctttcatgctgctattctcaggctttgatattagtgtggtgctaactgcagtaagaataggtagtttccgaagaagatatttaaataataattatatggaaagtgcttttttagtccagagacctggctaaaggatgtatgtgtgattttaattagattaaatttttctaatgtcccttggttaattacttgctgtaattatgtaaatgatgtaaaggagtttaaattgttgcttggttgttgaaaacttgatttgagaattgctgtcatatgctaatttaagataaacaccaagttgatactggacattattaggaaagatttaattatgaagctagaagtataaaaagaaccttaggaaataataaaattctgcccttatcatgtagtcaaatccaaggtaatctctagatttttgttgattttatttgctattcagagaaaagcatttcgtaagctttgacaaacaaattgttatttaagagataaaatttgtaatatgaatattggtatcactgaagcagaaaatgtattacagtgccttttttaattgattaagattttataactgagtaagagtacctttgatcctgcctttttgctgtgttggattttatttaaccgaaactgatttaaataactagttagaaaaattaaagagtgccttcatatttgatagttcctaaggaactatcaataaattgaacttccccatgtttggaaagcatacaaaatacatttaaaaaatacattttatttttaaatactaatggatgcaagcctttctcccaaggaggacacagtctgtaggatagagagacattacatctgcatctggctaaccttaataatgacaacccttattgggcagtatgttccaaaggacaggagcctgtcttctggtgcatactagaagcttaataatttttgaaaagatccattttctttatgggactcggctcattaaaatagaattctcctacttttaaaaaaaatgtctatgtatatccaagaacagtaatacaggtctttaaaaacaggtcattgattttaggtattgctacttccttttttatatttaatatttcaatcattaacccagtgtagcttgatctgttaccctctttcccttgaaacttctctgatcaccagtggcttagtggtcaaatccaaggtaccatcttttgctgtttatcttacattcttttgtagtattcgatactgttggtcaccctgtccttgaatctgtcatttcttagcttctataacacctctcttctctagttctcctgcctacctccatttcttcttggtttggatcttcttttccttaccccttcctttttctcaagtggattccgtccttctttctcccattacttgctctaagacatctcttctgatagctttaaccattaaatttgtatatgaaactcagacttctgctgaacttgcagtctgttgtcttttgaacatctctgtttggatattccaaagatatctaaaaataatggaagtggtcccgtttaaatatccttcggacaaattagttctgaagtacaaaagaggctttggtattagttttgtctgacaggcattcttatagttgtttactgaagctatgatttggaatgactggcctcgtttagacttggaaaaattagatgaactaacaagtccatattataccggttaggaaggagctcgggctttgaagttaatttaataagatatgttatttgattcgtataaaaattggtttgtagtagaaattaattaaggctatagtcttgtttaaacatgggcttaatccagagaatgatagaataggccaggagctccttatttgagttttaatgctttatcaatgaaaccctcccctgccctctcttttttcctctggactagcaagaatattttttttgtctaacacatttaaaatttttacttttaacagaaattagcagagtacggaaagacatgtacaatgacacattaaatggcagtacagagaaaaggagtgcagaattgcctgatgctgtgggacctattgttcagttacaagagaaactttatgtgcctgtaaaagaatacccagatgtaagtatattttgttgttttattcaattttgttctgcttcacatatgttgggaagagatatatttggtggtaaatacttaagcattattagccactttaaaaaaatgcagtcatcaactgaagtgtgaataatttggcatgataatttaaaaaatttctctctaaatatgtttgcatttgattgctgctatgtcactttggaaatgcacatggtatagactcttgggtttcaaaactggatgaggaattgtggaaagcactatggcctgactgacacagagcaccaagcacaacattgctcatctttaatctgaccttcaagaagccacagcttgggccacagcattctttctgtaaaatgaaggtgttggaccataagtttcctttcagctctaaaatttttattgaaaccactgattgtaatctgattttcccccatcttagtccattgttgaactattctctataagcatcttgttgtgaatagcctccttgtcctatatctgttaatttctaaataaatccagattctttgctttttgttacaaagccctatatgatacggtccattctatttctctggcctcatcttaaatgattttccctcttctttaccacactgtagtcacattgaccctcttttggcttttagaataagtcaagtctattcccagtcttagggaccccatgttagttgtgctctgatctctactggctggctgcttcttgtcattaagaatttagctcaaatgtcacttcagagaggcttcccctgacctttttatttaaaagccatctatctagctactcactgtttcacgttgtctttttttttctttgcaatagcacttataatcgggcatttttctggtttattttctctctctctgtctcccctgaagaatataaggtgtacataaaataagaaccttgtctttgttattcactgctgtatccctcataatattggcacataataggtaacaatacttgttgaatgaaccaagaaaagatgatggctttttgctaagtttcagaggacttttatgaaagcagatgaaaaaaggagttattataatatcaaaaatatgatgtgctctatgattctttagttatatggacagaatactagtctgtagatgagaaatgtcttaagttgaattaataggaaaaagctttgatattttacagttacattacaatttgcaaaaattgatctgatacttttttttaaaggttatatacatttactctggttttataggtatttttggttgcaaatacacaaatagtcttggataatgtaggaaaagaggagttggttggaagattattgagtaacacagaggattaaaggaatagttggaaaacaaagtgccatgttaggctaggaatcagggcatctgagaacttgagcagcaggagtttgtggagcttctcggttgagagccttgctgacataacttggcattggtgcctcccagactttatctttaaaattcagattcttagaagagtgaatgtgttttgggcctttctgactggggaagtgaggttatctaccattacctagacaggaccactgtgagcctaccctaggtattaggattattcctagagatgggaaattgtgatttgggcagctgttccaattggggtctactgctgttaggtttttcactatcctggaaaggatagcaactgtctgttttgcttatttaaacgttaagggataatgtttctgcagtgggcattaacatagaatatgtaagaccacaagaccttgatagagaatataatgttaatctgtctggttccatctcttaaaaaaagaaatcctattcaaggaaggggtatttatgcattctttaaaagacatgggtttcatacagtcttctaagtcaggacttgagtctagagggcacctgttcactatattcctttccttcctcctccagttgtgacttcttgccacggtgaactactattaccgactggtgtgttggagcatggcatttgtcttgatcggtgattctcaaaacacagtccttggaccatagtatctacgctttctgggaactgtaaatgttcaagcccctttccatacttattgaatcagaaactctggggtaagggcgaggcctagcaatttgcctgttaagccctgtagataattccgatgcatgctgaagtatgagaatcactcctctaatttttttttttttttttggagaggggacagggtcagccaggctgacaggtaggtgatcatgtacctggtcattttgccaggcatcgtttcaggaggcctgaaacagtaagtggtgaagtgatgaattaaacagtgtcactggtcttgtggagtggacatttcagtgacaaagacaaacagtacacaaatgaatctatagctgtaatcagtgttatggagaaacataaagtggggtagacagatgaatagtgactgtgtatggaaggaggtattcatttttaagggtaatcagggaagaaatctgttacaatatgatgggaatggagagacaggaacagaatgatgggaggaaggcatgaaaaccatctgggagaaaaacattctaggcagagtgaacagcaagtacagctgactcaggcaggaatgtgcttgggaagtgttgtaagatgtgaggttagagagttagcacaggggcagtgtcatgccgtggtcaaaagtaggaactcagattcagacttctagctagttttgctgcttgttttgtgactttggtactacacttgatcttaaccaaaaggccaggaagtgatgatgttttgtgactttaagcaaattacttttcattcctggtgttcgcttttctcatttctgtaatggagatattaaacctctcacaagattatgaagactaaagagttaatatgagtgaagcagttggaaaacatctttatgctatgtgtcacaagctctatgagggcaggaatctttttgtctttcagtgctgtatttctagtgcttagaatagtgtctgataaatggtgtattcacaataagtatttgttgcacatatttgtatgaaactcattctttcaaatattgttaaacttttctttttctttaaacctgttgtcttttgcatttgcacatagcaccttacttacagaagtcagtgttaagttagagatgtgttttggacttggcagtgcagatctctgaaactgatatgagaagaaagtctcagactcaaggtctgagaaatgaagtagtgctatagtctgtagccctttgcaacgtttttgaagtttggcctcatgatgtgagaatgagaggctaatatgaataggccactgaaaatgtattaaaattttcacagaattaatatttattaataaagcagacttctattgcatctctactgtgtaccaagcacatcctaggtaagaatatttaattcttttgaaaaaaactctttgatatagtaaagacaataggtttcttagtcaggcctaggttttgaattctggcttatcctcttattggctgtatttgtcaacagttgccacaataatgctccatgataaaacactctaaaactgggtggcttaaaaataataatcatttatttctgtgctcatgggtctgtatgttggctgagggtctactggttagggtgaagcctagcttgattgaggctaactgggtgggtttagatcttctccatttatgttcctgctgggcccaggctaaagcgggcagtggctgcttagggcatgctcttatggcaggccactggaatgcaagatccaagccaaactgcataagcaggtataaggcgtctgctcttgttgctttccattagcccagtgattctcacctggtggcagttttacctatggggacatttggcaatactagagatacttttggtgtctaaacttgggagagggggtactattggcatctagtgggtggagtccagggatactgttaaacatcctgtaatgcacagggcagtcagcctccgtgcacctccagccccccaacaaagaattacctggacccaaatgtcagtagtgctgaggttgagaaaccctgcgttagtgataccaagtcacttcatttacagagagaaggggactgaaataaatatttgccgaaaaataattgagatgatcacattggctttgagcatatgcttgctttttagaatctgtttctttgtctatgaagttataaggttcacttcataggattgttgggaggagtaaaggtaacaaatgtgtgacatctgatagagcaggcactctgtggtttttgtgattacacataagaaaaataatcctgttcttgaaggagttcagtcttgtgtgaaggataaacgattaaattattgaagactttaagtttctcatgcattcatgaaactacagacatgaaagaacattgaagttatatttagaccatcaaattgtttatttggctggtcaggttttcttgtttgaatccatggagatgtgttataaatgattatgaatagagttaactgatttatttaagtaaaaagtgttatattttgaatgagtcagtaataattttgtcattaaatttgcctagttatcaatttcaagttgttagaaattgttctataggatctgccagagtagtagacttgataaatattggcaaggtctagctgttgatgatactagtcgtcctgttaaatacatgaacagattagattggtaaactgcttcctttggacatgatgattaaattgtagtgagacttcttggagttttatgtgaatataattctgattttctgatgtttttaaaatgggatttaattttgactaatagctttgaaaggcatctcttgggtctaggccatcatgaatacccatattgtcaaaggttttgtaagacagacaaatgtcttttcaaggattgtgttttcagcctgtaggatcccagcctggttgctatagttagtagtttagattcataatgttattcacagtacactccactgtctctcttataataatacatgttgatgatggaacacgagttgtaagttctctttctgtttcattttcctgggtttgcaaatcagcttaggctcgtcatagcttctgagttagttagcatagggttgttgtttgtcagcagtcttgagaagttggtgtcaaattgggtgttgagctggcgtttgttttagagggattatggggagaggggccaattcagtaagttatctttccttaaagtctttgttcctttgaccattgcggccttcttattgttgaaggatcacgaacttcaggagtcttgatgtacactactttcactttcattcttctgaataacaaatgatattaaatcaaaatttaatgatattcaaagtctcctttttcaatacccaggttaacacttgatttttgcctgaatatgatcatattttgtgagtgaaaataataatgctttaaaattacgatctacacatctgtctttgatagtttgtacagaaatctatttaaaggtagtttttctcaaaaggttagtacatatttgtattcagtggagttgtgaagtgattcagattacatattaaagttttaatttagcagtgtgatttgataatatagggcatatctttatgttttaggtagggaaaacttaatgtataagttcaactagatcggtttagtaaaagccaatttatgactctttgttttgttttgaagtttcctctttatttcactctgtaagggtatatttagggcctgttgtgtaccaaatatttcataggctttttatggtttgggatataccacatttcttagaatgttagtaaataattacagaaagggttacaggacagtctgaaaacaatacattttgtttagctgatatttttccaacgtttaacatttctttaaataataaggcctctctgagttttaaaaatgcaggcactttcttttataaataatatattttagtatttgataggaactagtgcttagaagaacaaaatgaaagatggggttgttagggaagaattattcagattagacagaaacgtttgtctatggtttatctaaaaagagtttcatgttaggatctactctgttaaaattactgcttcaaaggacttatggataatttgatatctactcataggtgttcaatctccatatctcttaagattcttgctgaaatagccaaagtatgtaatatggaaatcgaggagaaatctgcttctcagtgctatccatattccaggaacattgagctgtttctgataaagattaaaggaaagctcaaggtgatgatctactttcagcccaatttgagagagcagtgtctccgggagtaaaatggctaataacagaatcttcctcatcctaacccctcagaattgtcacacatgaaatgggctatgaagcagtcaaaggttatactgcttgaactcttccactcatttcagttcctgtttataagtaggtgacctaaatttattttgtaagttaatgagactatgttttcttttgatttcagtttgggcggaaaagtaccttagtttttgagatcacgtgcctttactttagggatgttgaggttgagtttttcagctactagcttttgagataaattcagttaatcatttcattgggaaaaaatacatatatatttaagtaatttttgttttgttttatcttagagacaaggtttcactgtgttgcccaggctggtcttgaactcctgggctcaagcaatcttcctgcctcagcctcccaaagtgctgggattacaggcgggagccactgcgcccagccagaaaacatattttatgtcttaataaacccaggatttacaacaaggtagcttacaaataaattggggatttcttgaaatcttgttttgtctgccatagaacactgcttttcccaagtccaaaatcagtgtcatcaataagcagcctgtctatcataaacttgggcatctacttgtttcatattggtataatattttctttattatttggtagggaattgattgactttgaaaacttctatcctgtattgtttggggttacagaacaatgattgttttgattagtttctttgtacttttaagattgcatataaatagtataaatttgccatgttaaggacagattaaaacaaaactcttaaaatttgaaaagtagttagaacttgaacactaaaaaggatatctgaatataaaacagcaaaattttggtatcatttcttcatcctggaaatgtttgtgtgtggtctgtgctaggtaacaggacacaggaatatgaaaagatgtaattgctctcatggtactgatatagccacaatcctggtatggaataatgagagcttgaactcaggcaatggcagttgaaatgaaaagcacaaattaaatagggagaattttaagatttctttatcttttacatgtgaaggctaagaatgagggaagggccttgctggtattgccattcgttgagaataaagatgtatgtgatgattattaaagtggtgacaatcagtaaaacatatgaaaatattgagaaaccaagatgtgattatctgaaatgatacagtaatgatatgtttgggatatatgtaggtggggaagaaatgataaaaacacaactggactaattctgaaagtaaacttggatttgaatagagtttctataaactgagtactaaacattttgaaagattaacaataatgagaaaactaaccatgaatttttcttgttatcagggtatatgttaaggtcattagaagagaggcattatactgtattaagtgtctgaactctagaatcaacctaggtgttctaggatttgggctactgatgtaacctcacatgtattagatgtaggtggtagtggtaagcactgtgcagtggtgtttcgaggattaagtgacctaatgcatgtaaaatacccagcccagaagttggctcatacttgaacactcaaaacatactgcagcatactcaacaccaaagaaatgttgaataacgtagtccttgcactcgtgatacttcgatttgacaccagcagcaaaggggaaaaattaataaccagttataaccaaaatttgaaatctgtggtatgcgaattaggatatcctaaattacggtgtatcattctttgagtactgatataactggataataagctgaaaccattcaaaacaaattcacgtgaggaagatagattatcactctagatgctaagtaacaattagaaaaaagattatttaaccaattaataaaaatacgaaggcaataaaggtcaacaagtgttttatgacaagagcagaagacagtatttgtgagagtatgagatccaatgcacaaggccttttgaaagatcccaaactactttccaagcctttattttgctgctacccatgttttctagccacctaagcaattcactcttctgtaaaaatggcaggtacttttaatttttcttccctgtaacacttcttttcttatttcttccttcccaccaaacatgctcagctccccctcatcccacaatattgagctgtagtgctccttttgctatttgtatgtgctttgactcctacagacagttgtttccccttagagtactttgtacccacctcttaagctgttatcacatggtatgcagtgatctgcctgattcttgcaggtcattctctgaagtcaggaactcgctcttagtcttttattttttagaaatctatgatatctcgcgcaatacatagcccatagaagaaactatgtagtgaaattacatagtgatttttcattctcgcagtaaaaatttcctgggattttttttttttaatgggtgggaaactacctggaaatagtggatgccagagtcttaaacagaaggaatgaaataataaagatcagagcagaaataaatgaaatagaggccaggaatacaacagaaaagttcaacaaaacagagttggtttttgaaaaggtaaacaaaattgacagacctttagttggactaaccaagagaaaaaaaagtcaaaatacatgaaggagacattacaactgataccatagaaataataagatcataaaagactactctgagtaaatatatgccaaaaaattgaacaaactagaagaaatggataaattcctaaaacatacaacctatcaggaccacatcatgaaggaacagaaagtctgaacagacctataatgagtgaggagattgaatcactaagtcaaaacctcccaacaaatagaagcccaagagcagacagcttcacgggcaaattcctctgaacatctaaagacgaattaccaccaacccttctcaaacttccaaaaaactgagcaggagagaacacttcccagattcattttatgaggccagcattacccttaaccaaagccagataaggacattgtaagaaaataaagttacaggccaatatccttgatgaacagttgcaaaaatcctcaacaaaatactagcaaactgaattgaatagcacattaaaaggagcgtacaccatgatcaagtgagatttttcctctgaatgtaaaaatggttcaacatatgcaaatcattaactgagctacaccaaattaacagaatgaaaaataaaaaccataagatcatcttaaaagatgcaaaaaaggcatttgacaaaatgtaacatcctttcacaatgaaaattctcaacaagtaaggtatagaacagtatgccacaacataataaaggctatgtgtgacaggcccacagctgacatcatacttaatggtgaaaagctgaaagcttttcctctgaggtcaggaagaagacccttgctacttccattaaatatggtaagttctagccagaacagttaggccaagaaaaagaaataaaggcagccaggagtggtggctcatggctctgattcccagcactttgggaggctgaggtgggcggatcacttgaggtcaagagttggagaccagcctggccaacatgaaaccctgtctctactaaaaaatacaaaaattcaccaggcatggtgatgcatgcctgtaatcccagcttgctcgggaggctgaggcaggagaatcacttgagcccaagaggtggaggtcgcagtgagctgagattgcaccattgcactccagcctgggcaacagagcaagactgtctcaaaaaaaaaaaaaaaaaagtaaaagacacctaaatcataaaggaagaaataaaattatctttatttgcagtggcataatcttgtatgtagaaaaacccaagacttcatcaagaaatctgttcacttagtcaagttctgggatacaaaaatcaacatacaaaaatcagttttctgtctatacactaacaacaaactattcaaaaaagagattaagaggtcaggtatggtggttaacacctgtaatcccagaactttgggaggccgaagcgggcggatcacctgaggtcaggagtttgagaccagcctggccaacatggtgaaaccctgtctctacaaaaaatacaaaaaaaacaactgggtgtggtggtgcaggctgtaatcccagctacttggaaagctgaggcaggagaattgcttgagcctgggagagacggaggctgcagtgagccgagatcacatcactgcactccagcctgggtgacaagagcgaaactccatctcaaaaaaaaaaaaaagggctatctcatttacaatagcatcggaaagaataatataattagaaataatacccaggaggtaaaagatgcctgctcgctgaaaagtataacactgatcaaataaattaaagatgcaaataaatggaaaaatattccatgttcgtagattggaagattattgttaaaatttccatacttcccaaagcaatctatagatccagtacaattcctgtcaaaattccattggcatttttcacagaaataggaaaaaacaatcctaaaattcacgtggaaccacagaaagcacctaatcgccaaaacagtcttgagaacaaagctgaagacattgcagttcctgatttcaaattatattaaaacaatttgcttctggcataaaaacagacacatagaccaatgaaacagaacagaatctcagaaataaacctatgaatatagagtcaactaatctttgacaagggtaccatgactacacaatggagaaagaatcgtctcttcaacagttggtgctgggaaaactggatattgacattccaaagatgaaagtggacccttacttacaccgtacataaaaatttagtcaaaatggattaaagacctaaatgaattccctgaaactataaaacatgtaggaaaaaacactgaattataaaggtatttgatactggtcttggtaatgatttttctagatattacacccaaaaaacacaagcaacaaaagcaaaaataaacaggactacatcaagctgacatgcttctgcacagcaaagaaacaatcaacaaaatgaaaaggcaacctacagaatgggaggaaatatctgcaaaccttatgtctgctaagggtttaatatccaaaagataccagaatattaactcagcccaaaacaacaaaacagcaaaaaaaaaaaaaaaatgacatcacccaatttaaaaataggcaaataacttttagacattttttcaaaagagaatatacagatgtccaaaaggcttatgaaaaggtgcttaacatcacacacacacacacacacgtgcgtgtacatgcgtgggcacagtagctgtgtgggtgatggatgtgttaattagcttgattgtggtaaccatttcacaatgtataccttgtattaaatcatcacaagttaaaccttgttcattatatctcagtaaagctggagggagggattcagtcactaaattgtaagttgtatgcagcacaggaactcatatgtttagaactttctcatataataagcctgactggctgttctcaggataaatcccaaaggacaaagtcagtaataaaaaacaaaacagttactatttccactttctatttcaacatggaagtatgcagctttaaatttttgttttgtttttacatagccttgtaagaaaccttttcttacacagcacttgtacgtaacatgtgccatgtgtgctatgaacaaaaatgtttataaaggcctaatatgtgaaaggttttgccaaatgtttcctgtaatgttaattatattttataaattagctatttctccaggagatgtatttagccacttattaatttataagaattaatatgaaggtaacaaggcataagatgctcgttttccctcaaaacacaagacattttggtatatagtctccaacttacaatggtctgacttaggattgtttacaatggtttgaaaggatatgttttcagtatgcttctcaatttatgatggggccatctccagataaaaccattgcaactgaaaatatcgtaaatttaaaactgcactttcaactcagtggtgggtttattgggacttaactccattgtaagtcaaggatcatctgtattcattctgtatttttaattaaaaacagttgtgctgttaatatatagacacaactcttctctcatcttacatacttgtataagataggcccactagtgttgactagattgggtgtggtccgttttttgtcttctgctaagtgaaagacttcagaaaatatacatatacgcttctgtgaatgtatttgtttcatacccactgtgttgcttatgtgatataatgaaagatttgtaaggcatctaactaaaatcaccctagaaataactagacacaatatttaaaaacattatcaatctgttgtgcaaaaagcaatccaaaaaagtgcattttttaaatgaaaacttggtctctccccttgtccccaaattttaggcacagattacactttatcagttcttagaagtgtttcacttgaggtgcttttcgaaatccattttttattatctattgtgataatgtgttgcaggagtttatctttaattagggaattttaaaaaggttaatggaagggttttctataatgctttacattttgtcattgggaaaaatctatcatttccatttaaaatgaagtgtgagcagcaatgaacagcattagacataattgttgttaaacctcttctttgtaaattaacatgccacttggcagaaatataattggtgagccacagagaaggtctgtatttaaacagtagggttaatgaatatctttttttcccctttttctttcccttcttttggcctttaaagttgcacttagctcaggctgtttgaaatgattttctttgaaagtgttgtgacattgttttaattgaatgaagctgcagaactggcgtgataaatcaacacagaatgaattttaatgcaaggcaaacgatattaacctggaaattggttgcagtagacaaagcagctgctgtgattagttttttttttttcttcattctctacttacaacattttgagaaggatgacctcgacaatttcagctgtactagagtcctgatggcttgcaccttaacatccttgagctgtttgtggcttcttggggcaatagtgattgtttcattttttaaggttagtaaaattttttaaggttagtaagattagtaaggttagtaagatttaatgtgattttaactgctttacaaatatttttaatttagtaaatcataattgtgaggattaattagctgtggtagaagcccttttctatgtaatcttgatgtggttccagccaaggagggttaatacttgaaaagcatggggtatgccaaacaaggctctatatgtggtcacagagtgtagggcagctggtttcacaaagggtacgggtcaaaaccaattacatattagtgatttgtactaaagtatctctgttcataatgcatttttccagacatttttgggccatatgtgaagtatataatgtgtatctagttagtgacaatttgggaaaagatctgtatagagtacaactattattgaagagtagctggcaaggttacttaaagaaatagccaaggtaacaaatatagtagaggcattttcacagacttcttgagagcagagtttcgttattctcaatccttcacatttacttcactccttgccacataataagccttaagtaaatgttttgttgaatttgaaaatgaaaggctgttctctgttttactgaaaaacagtgggtgagtgatagcatgtaaagattattatctctgtccaggttggaggagtggggaagtgaaatttaatgtaatctgtgacttacataaactggttaagtgatgatgttgtagaaaaaagtaggaagagcttattggagatgaacataaggccaggcatgttgatagattttctgttatgtttcttttttattcagatcctcatttcaacattgttacaccatactaccttatgtcaattctagacctctttagattaaaaagcaactgctcaaaaagtgccagtagacttgtgtttgttaaggactgacaagataatgcaggccagctgagcaattccaggaaaataggatacaataggaaaaaaaataactgaacacatcagagattgtgaatcagcaagattgtgaagaattactagttcatggtcttcaggaggtgagatgatcaaggatataaccgtgttttgggggatctctttttctgctgagcacgtttgcagaatctggagaggacagacgaaaggctgagctttgggggatagcgtttggagtctataatttgtctatgtgaacctcccttgccatgcccagcctagtcttcgcttgggggtagggacactgatggatacgtactttaggagtaagaatgaactaggaggttgcaggtcctcacagagacagtatctcagctcaaaattgtctatctcagtaagtgaaattgcattgatcctgggttgctagtaatagtaggtgcctggcagaagctgatatgtatctttcctggaggaagatattattgtctttggccttatattatttttataagctatttagttaagtgtattgtctgacacacactagaaaataagcacacaaggagacaagatgacattaacaaaaatctgaagaaacagtctgaaaaacaatacaaaatccacatactctagattttagaatttcagacccagactttataagatctgtaagttttcaatgtggaaggagacagaagaaaaggaagagaaatggaagctataaaagaaaaactaagccagaaaattatttacctactattaacaggtgggtttaacagaagattagaagcatttgaagagagaattagtaaactggaagatagctcagaagaaaattttcagcatggagatgcagagggatggaaaaaagtagaagggaatgtgaaaagtaaaaggaatatagtgagaaaatttaatatatgtagttgtagtattagaagaagaggagaggtggaatgggacagaagcagagtttgagggaagtgtgtttcagaactataaaaccaaagaaagaaataaagtcacagatttgtgaaattgtggttttctttatatttatcatacttactgataaacatgataaaggagaccacaccttggcaagtgataataaaacaactgaaaagtaatgatgagaaaatcttaaagcagctagaagagagaaaagatcaccttcaaaggagcagcgggaagacttagttcacttccattagtaacagtggaatgaatccaggagatggtgtataaagaatctttaaggtgcccttcaaaaataagacattttcagataaggaaaaatggagagagttcattactagaagacgttcactaaaggaaatgctgaaggttgtttttcaggcagaagaatgatgattatttgaaaagttgaagatgcataaaggaataaagagcaacaaaaatggtaaaattgttgataaacctaaatgcatatttgtacaaagtgaaaataatggcctgttgagtttaaaagatacagaatttgaaaaacaaaggcatataaactggattgaggataaatattacactttctgaggtccttgtatttgtatgggaaaagggtaaaagtacaaatgaacattaatgtttgataagtcaaggaagcatgttgtaaatactagggtgaacaagcatataacttccaaactaatagaagaagagaacgaagaaaatacgttcatattttcttcgtccgcccacatccaggaaaaagaggcaagaaagaaaagaaaataagtagaggacatagaaaacacttagtaaaaagatttagtaaaccatgtagtataaattggctgttcctgttaaaattcaatgaagaaacaactcatttagatgatttttacaggagtcctgtttaaaataaggataacaaaagtttgaaggtaatagattggatcaagaaaagacacataagaaaataaattctatctatattagtatcagtgtaagcttaatggcaaaaggcatctctagagataataaagaaggccacttcataatgacagaaagatatacacttgacccttaaacaacatggggctgaggggcactgactccctttgcggtaaaaaatccacgtataacttttaactacctccaaacgtaactactgatagcctactgtcgactggaagccttaccgataacataaacagttgatcaacacattttgtatgttacatgtattaacactgtattcttacaataaaataagccattgagaagaaaatgttttaaagaaatcataaggaagaaaaaatacgtttattattcattaagtggaagtagatcataaaggtcttcatcctggtggtctttacatggagtaggctgaggaagaggaggaagattcaggtttggtcttactgtctcaagggtggcagaggcagaaggaggtgatggaggtgggaggggtgtcatacttggtgtaatatttgtggaaaaatgttctgtaagtagacccacatagttcagacctattgtttaagggttggttgtaattgcctttacacatatacagcaaaaatagaagtaaaaggcgaaacaggtaaaatttaatcacaccagactttgcattctttttaagcacctatggaatatttacaaaaattgaccatatgctatgctgaaaagcaagtttgaacaaatattaaggatggctattacatataacatgtttgctgattacactgtaggaagctaaaaatcaaaactacaggaaattatatgttgaaatgagcataatatatttaaatatttagtagatgtcaaattaccttgactttgaatgaaaatgaaactgctccctatctgaatttgtgggatacaactaaaaccagcttagaggtatatgtaaagctttagatgtatatgttagaaaagaaggaatacaataagcaaaatattcatttcaaaaaattggaaaaagaacagcagattaaacgaaggaagggaaaaagaacagcagattaaacgaaggaagtagaaggaaggaaataaatgaagagtagaaatcaattaaagacaaacacaaaatgaagtaattcaatatatcagctagctatctctacattataataaactactccaaaatcttaagtaaaccacttgttgagctccttagtccttcttccagtcagctgtaaggtcagtcaggtagttctacttctgggagttgcgtggttgcagatattgatgatgactgggtcactgtctttcattccccaacaagttttagtccaagcttgtttacatgggggaaaggggctctaagagagtagaaccacgtaagactaacactgaggcatatcattctcaccactacgttgtattggccaaagcaagtcacaatgctagcctagattcaggaggtgggaggagatgcagattccctttgcagatggcatggacacaatgaggggcagagaattatggtcatttttgaaatcagtctacctcagtcaacaaaagcaggttcttttaaaacacttttgaagacagatcaagagaaaggaagatacaggtaaccagtcaagaataaaaaaatgagacatcgtttcagatcttattggtattaaaaataaattaggcatctattttaaatcaacaaatttgaaaatttagacaaaatggatacaacttaaaaattgacatacgaaggaatagaaagtctgaatccataatttaaaactttctgtagtgaaatctctaggctcaggtagcttcaccagtgaattttattcattatttaaggaagaaataacagccatatacaagcctatctggagagtggaaaaaggaggaatacattccaacatgttttgctaccagaataaccttgataccaaaacctgagacgtgtattatgagaaagaaaaattgtgggccagttctatttatgaatggacatttcttaaaaaaaaaaatcaccagaatgccaggaaacaatttgctcaagttgattttgcattaaattggtttaacatttgaagttgaaattgaatttgaaattaaatttgaagttgaagttggttaacatttgcagttgaaatccactgcaataacagaattaaggagaaatgttgttttaatagatagtgaaaaatgataaatttagatatccacttgtagttgggaactcttagcaaactaagaaatagaagggaattttaatgtgataaagtgtatcttcaaaaagtttaagattaaactttatggtggactgttgaaacctttattcttgaaatttggaacaagtcaaggatgacacacttttatttggctttgaactcaaggtatgctgaccagtactgtaaggatagcaagaaaaagaaataaaaatatatgataggaaaggaaaatagagaactgtcattatttccaggtgatgtgattgtttagcatccaaaagaatctacaaaagatttatgagagtcagtaatgaagaaatgctggttgtaaggttgatagaaaaaaacccaattatatgttcatataccagaaacagaaaatgaaaacttaaaattatgatatacggtagcagaaaaagccctgtaaatttgtaggaatgaatcttaacaacaacaaaagtaaaaacaagtaaaggcacaatcaaaaaagctctacatttttgaggctagacatggtgtctccagcctgtaatcctagctctttgggaggcttaggcactggggtggagtgggggtgaggatggcttgagtccaggaattttgagatcagcctgggcaacgtagtgagacctgatgtctacaaaaaagttaaaaaaaaaaaaaaaaaaaagccaggcatggtgaggctgaggtgggaggattgcttgaggccaagaattcaaggctacagtgctctatgattgtgccacttgcactttagcctaaacaaaaataaacttgacgttattgagagagatgagagataacttaaccaaatggagaaattttaccatgtttatggtttttgaagagtctatattataatgtgatctcagtgaaaattcttgcaagtattattttagaaattgatggacttattctaaaatatgtggaaatggaaagggccaggaatagctaagccactcttgaggaagagcaagagagaagaacttggtgtaccatataatttaccataattaatacagtatgatgttaaagtaaagataaataaatggaatagactagagagctccaaaacagacctaagtactgtcagctgtttgtatcctcaggttccacatctgtggattcaaccaacctaggatcaaaacttttaggggaaatatttaaaatggttgcatttgtactgaaatatacaaattttttcttgtcattatttcctaagcaatgcagcataacagtgatttacacagtatttacattgtattaggtattttaagtaatctaaagatgatataaattatattggaggttgtgcataggttatgtgcaaatatgacaccgttttatataagggacttgagcatctgtgaattttggtgtttgtgtggggacctgtaaccaatcccccccaccccagataccaagggacgattgtgtagataaatatttatgacagtgatgacactggagcaattggaaaagagtagtcttttcaataacatttctattcagtgacattcgtatatttaataacatttggatattcatgtgagagaagaaaagaaaattataacacagacatcaattcctggtacactgtagatgtaaattcgaaagacttaacaataaagcttctagaagataacaccagaaggtatcttggtgaccttagggtggggagagacttcttttaaacaggacacagaaaacactaaccatgaagataaggttgaaaatttgaactgtgttaaaattaaaaactttcagtcatcataagacaccattaaagagggagaagacgagccacaggatgggaaaaatacttgtcagttgtgtaaccacaaagtagaaatcaataaggaaaaggtaacacaatagaaaaacacaggaaacttcaaatgtccttcaaaaaatgcatatccaaatggccaacaaatgtgaaaaaaatgcttagcttcattagtagtcagaggaatgctaattgaaacatttaatacatacactagaatggttaaaatataaaaacactgataataaatattggagaggaagtggatcaaaataaatttttatactatacggaggataaaaatatgtacaaccattttagaaaataatttaacactatgtactaaagtttttttttttttttttaaatcatcttctttgtcctgtagtcttttttttctcaagggtcagtctcttgtcctgcttctttatcttgtcctgtctctctcatgatagagcccttcttgaacctttggtgaacattgtttaagtgtgaaacaatgaaaatctgaattaggagcttgtgttcatgaacagagctgtccgctgccaaccttaatttggggtgaccccctaaagtgctagtctttgagatggaagtcatataatggaacacagaattcttttcgtgggttatttcaatttttctagagaaaaaactagcccattacctacaagtcagaagcctggcctttgctgttctgtgggcagtgatggtcgcttgttctgtgtattagttccaccttttcattcttgttttctgcaaaactcagtgtgtgagtgtccagtctctctggagttctgtagggcaagtttgctgctgatcacatctccttctagaaatgacattccaagcttaattaagagtaagagcctgaggttttaagcaaaggatttgtattagacttggtaggctattgtgactgtatggcaaactttttactggaccttgtgtatgtattgtgctatacacatacatatctgtacatgccatcatcactatagctctgtcagatagtattatccccattctgtaattgaggcttatttgatgtgattttcagattcctttttttgttttgttttgttttgtttttttttttttgagacagagtctcgctttattgcccaggctgtagtgcagaggcatgatttcagctcacggcaacctccacctcctgggttcaactgattctcatgcctcggccacccaggtagctggaattacaagcatgcaccaccaagcctggctaagttttgtatttttagtagagatggggtttcaccatgttggccaggctcgtcttgaacgcctgtcctcaagtgatccaccccgtcttggcctcccaaagtgttgggattacaggtgtgagccactgcgcctggccaatattcagattcctgattactgttttcatatttgagcttggataccagctagaatctgtgtgctctcagagtttaagcacataaccgtagtatactacttgagtttatttaaattggagatgtaggaaggttaagttgatgagtttctaaattggaagtactttgttaaaatggatcatggtgggggtttaggttgggtaaagaggtaaaattactatatactgaagcactgggcaaagataagggactttatctgaatataaagagctattagcagatttcagaatctaggatcttgaagagctaaattaagtgcttatagatgagtctgtgagtctcaacagagggtgaaataagatgtatgaaaatcccctcggagactttcttcgaatgatacaggcgtactacctaccacctttcatttgagaatcacttttctaaggtgtgacaatgcaaaataagagccagtggagtacagatgataccagaagtacccagcttcttaagccctgatggcagtggattttctagcacgttacttttatgtaatgatatactaaaagttggataaatgcaagaaaaaagtagaagaccatatgcataagaatcagtacctatttgattgaataagtaaatgaaaaccacctgtggaattttgtggaactgatagcaaactcttatattttggcctttatgcagataacatgcaaatgaggaaaatttacttttcacgatttagcccgtttttcctattggctttaaagaaataacttgtatatatgaatattaggaatttctgttgagggatggtaattttttatttttttattgtacagtttttaatttatacaattattgatatcactggcctatttagtgatattcagagtttaggtttcttataagttaaaggtagaaaggaatatgtactcttaagacacatttagtgtagccaacccatagttttcgtaacatatttctgaacagttgctttggagaaagtataatttttcttaggtaaataaaagaggactttccccaaaggattttggtagaaagggcagtgcctaacaatttcttcaacactgtcatgacaaagagacagttggacattttgtggaagggacttgtattcttggctggcatctaatattttgtcaaactctttaatactctctgttttaggttatttgttgatggacagttgtatctgttctagctgtatactgttcccagttcatagtttgtgttaatacttgtgaaaatataatgctaaacgatgagctattgtaattagacctgagacttagcaagaaattcataagggctctagattttatttcaacttagtattaaaaagacatttaacttcagtaagtaaatgtagatatactttatattttaagagctgtaagttccagcaagtgaataatgtatagtgatccttttttttttttctcagtttaattttgttgggagaatccttggacctagaggacttacagccaaacaacttgaagcagaaaccggatgtaaaatcatggtccgaggcaaaggctcaatgagggataaaaaaaaggtaagtccttgaaaatggactaagtctttatgtgagtaacttactatacttttacatcgtaataataaaatttccagatttttttgtgcttaaaacactatattccaggccgggcgcggtggctcacgcctgtaatcccagcactttgggaggccgaggcaggcggatcgtctgaggtcaggagtttgagaccaccctagccaacatggtgaaaccctgtctttactaaaaaaaatacaaaaattagctgggcgtggtggcgggcgcctgtaatcccagctactcaggaggctgaggcaggagaattgcttgaacccgggaggcagagatttcagattgtgccactgcactccagcctgggcaacaggagtaaagctctgtctcaaaaacgaacaaacaaacccactatgttccatgtcaggaacttttaaactttttaaaggtgttgtcatgattttcccttgtttttcttttttctttgtttgttatttttgagacggagtctcgctatgtcacccaggctggagtgcagtggtgcaatcttggctcactgcagcctccgctttctgcattcaagtgtttctcctgcctcaggctcctgagtagctgggattacaggcgcacgccgccatgcccagctaatttttgtatttttagtagagatggggtttcaccatgttggtcagtctggtctcgaactcctgacctcgtgatccacccacctcagcctcccaaaggtctgggattataggcgtgagccaccacgcctggcggtttccccttgttaattatcattttttacttagcaaattaaaatatcagttcatcatgttaccttcctttgtcatttacttttgggaagctgccagtttggaaattagtcagactgtaatgtgtgtaaaagtatataaaagttttgaaaaatctgaaatttttcttttgatgagatttaaataagaatggtcaaataactttggatgtatgtcagatcactgggagagttagaagacagaaatctattagaaggaaggctatcactagccatatgagatacactttgggtttcatcaacattttgtgttgattttacattttaaagtatattgtttctgtttctgtgggtttttttctcctgccatttcttcttttgctggtttaattagtaaagacccaactatctaaatattattgttaggaagattttatttacctagtttgtcttacccagcaatactgtgaggcaggatagttttgaatttctattcttgtaaaaattggcggatttaaaaaaatagattttgatggccaaagattaaaagtgttttaggaaggtttggtctgtctgtctgtctgtctgtctctttctctctctctctctctctttcttccttccttccttcctttctttccattgacttgaaggggctatctaggaatagtgcgtggttagctgtgttagaccagtacgctgaatcgctttgtggaacttacggaatgaataccaaacccacagggtatctgataaacttgttttctgagccctccgcctcatgtcttttaagccctcacataagctgactggatctcattcatttttgctcctcatcaatgatttagtagccaagaaatttgggcaaaaagttctcataatattgattatttaaaaatcttattataatgtattccttgtcaactgtgtttaaagatatgttcatgggagtctgtgagttctccttgagcaattttagatgtattaaatttttttatgagaatcttaaaaaaatgtgcatattttgaatcagttgagtgataatcttttcaaatgaacgttgccatgaagttttggttctcatgtttggacttaggattatgtggtcattaagtaatactagtttaattgcctatggacaatgaatgaagtcttgacaactggcagatatataaatctgtatgaaaagattagtatatattcatcagttaggctattctgtcagccagttaacaaaacccctttttccctgcttctgagtttctgtgaattctgcagtaatggccccccactcaaccttgcttactgtttcaagccctcacagacaatgagcattagagcttataactgtgtgattatactgttgcactcttataagtgtttataataaaagtaaagtcagaatggaatgcttggccatttggtaaagaacatgaaaagagatggaaacaaaaagaagtattgatgtaagtaataaagatagctcattgagatgtatttcaggagttcaagaggaaaagccatttgctttaaacttttctacagagttgtccatgtatatatagacatgtgtgtatatatatatatgtgtgtgcgtatatatataatgtgtatatctatatgtgtgtatatactgattgcctgttttacttttaacacaaaatgctacgatgggaatggtgtgtgctggtctgaatccttccctacactggtaaactcagtgagagcctaccatggctattctatggagtattaatttccttggtgtttggtgagtacctggcacagagtgcaggcacttgaaaaaaatacctgtgaaaggagtgactagttcaggtaataaatgaaaggcttaggtgtaccttccctcatgttccccgaaaaggttggttaaataaagaaaattgtaaatgctatgtacttctaatgctttggggaagttagtactatattattctaagctgctggtttttagcaagtaagttaatatgccactttagttttcattttcttggattgttattatttcagcattattgatgggctcaacagcattgatttagtgcataaatacccagtggaatggtactagttaagatcatggaaccagggcttgaaaactattatgaacttcttgtctgtaccagctattttgtaaatgaagagaccaaagccttggggaggttgagtaatttgccaaaggtcacacgccaaaatgtggcagtcaaatttgaaactaggctgggcacagtggctcacacctgtaatctcagcactttgggaggctgaggcaggaggatcccaggagttgaagaccaacaaggtcaacatagtgagacccccatctctacaataaaacttaaaaaataattagccaggtgtggtggcgtgcacctgtagtcccagctgctaggtaggctgaggagggaggatgcttgagcccaggagttgaggcaacagtgagctatgattgtgtgccactgcactccagcttgggtgacagaacgagactctgtctcgggggaaaaaagaaaaagaaactgaattctgagttctattctgtggtacattattttctaattataaaccatttctaagagtgataacttcagacatactagaacaacttgaatattgagtattagaaactttgactaccatttcacacaccacccagtacacttgtgaccccagatgttgtaagggtttctccccacaaaccaaacaaatctccagaaaacaccatctgaatgtcctctaattcagttcaaaactgggaataatgtcacataccacaggctgagggctcagtcccctaagactgtctccacttcagatgccagttacaagccccagtggtgacctgtgcttttgactgaccagctgtaaatgtgtttttttgcaagtccctcgtcgggttcaattaatttgctagagtagttcacagaactcagggaagcactttacttatttattataaaggatattacaaaggataccgacgaacagcagatggaaaagatgcatagggcaagacatgtgggaaggggctcagagctcccatcccttctccagtgtgccaccctccaggtgcatccatgtgttcagctatttggaatctctccaaaccccgtccttctgtttttttgtggaggtttcattatgtaggcatgactgatgttcatcattggccattggtgatcgactcaacattcagcctttctcccttccttagaggttggggaatgaggctgaaagtctcagccctctgtatacttggttagggtttctctggaatcagccttgatcttgagactatccagggcccccacccatttgtcacttcattatacagaaagacacaaacaggttccagaccaccacaataagggaacattgcgataaagctagtcacacatttttttagtttcctagtgcatataaaagttatgtttataccatactatagtctattaaatttgtaacagcattatgtctaaaaaatatacataccttagtttaaaaatactttattgctgaaaaatgctaatgatcatctgagccttcagagagttttaatcttttgctggtggaaggccttgcctggatgttgatggcatgttgatggctgctgactgatcagggtggtggttgccaatggttggggtgactgtgacgattgcttaaaataagaacaacgaagtttgcctcatggatttgctcttcctttcacaaagatgtctctagcatgcagtgctttttgatagcattttacccacagaacttttgctgttgctttataaactaagtttatgtaatattataaatttttttttgtcatttcaacagtgttcactgtatcttcactacaaatacatttcatctcaagaaatcactttctctgctcatccataagaagcaactcctgatcaagtttgatcatgcagttgcagcaattcagtcacatcttcaggctacacttctaattctagttctcttgctctttccaccacatctgcagtttcttcctccatcatactcctaaacccctcagagtcatccttgagggttggaattaactttttccagactcctgctaatgttgatattttgacctctctccatgaatcatgaatgttcttaatggcattgagaatggtgattcctttccaggaggttttcaatatactttgcccagatttatcagaggaatcactgtctgtggcagctataggcctatgaaagacatttcttaaataataaggcttgaaagtctaaattactccttgatccatgggttacagaatgaatgttgtgttagcaggagtgaaaacaacattcatctccttgtacgtctctaccagagattttgggttaccaggtggattgacaatgagcagtaatatttggaaaggaatctctttttctgagcaatatgtctcaacagtaggcttaaaatattcaataaacctttctctgctgacatccaggctttgttgttccaattgtagagcacaggcagggtacattagcctttttttttttttttctttttaagacagagtctcactctaccgcccaggctggtgtgtagtggtgcaatctcaggtcactgcaacctccgccttctgggttcgagcagtcatgcctcagcctgctgagtagctggggttagaggcatgcaccaccacacccagctaattttttgtatttttagtagagatgcggttttgccgtgttggccaggctagtctcgaactcctggcctcaagtgatctgcccaccttggccttccaaagtgctaggattacaggtgtgagccactgcacctgtcccatttagcataatttttaagggccctagtatttttggaatggtcaatcagcatttgcttcaacataaagtcaccagttgcattagcccctaacaagagaatcagcctgtctttggaaggtttgaagccaggcattgacttctctctagctatgaaagttttagatgtaatcttcttccattagcagtccagacacacacagtacttgtcacttaagttcactgtcttatatgggcatggtttggtgtgccccagaacaattacagtagtaatttcaaagattactatctacaggtcactatggcagacataataataatagtaatgtaaaagtttgaaatattgtgagaattaccaaaatgtggcttggagacacgaattgagcacatggtgttggaaaaatggtgccacaagatttgtttgatgcagggttgccataagccttcaatttggaaaaatgcagtatatgtgaagtacaataaaaggaggtatgcctgtattacttgggagattcaggggttttaggagatttgtgccaggaaacaaagaccaaatatatttatttcatcataaatcacaatatcatactatcattcctttgatttttcaggaattctccctagaggatttaatcccatgtacttaatggaaatctatatacttgagcagattacaaatgctagaggagtaattttagatgagatcgggtgcattcagtatggtatggtgtagactagaggatgaattttaggaaaagaaagtaattatggtgtttcacttgaggttgcagaggccgtatccagggctgtgaaagaaatgtattcatgctaggaggcatggtccacctttagaaacaggtgggagtcagctggttctaatgtagcaaatgagaacatgtaagccattaaaacagaacagtgttttgcacgtaattaggtacttggcaaattgttgtggagtgacaagtagtacattgaagttcaccctttgggtatatatatgcatggtcattgtaggggacaccatttgtggttttgtcttatccgtctgcaatttgtcagctcttctgaggtctcccttctcataaacaagaggagaataagtagccatgcttgtgggttcctccttctcacctcctttttctgtccttccttctctcccattgtgttgatgggtgaaatgtatgcagtttatcaaagccatgtcagtcagatgttgcatcatctggaaatgtgcaaagacttagcaattccagttcaagttctttgctcaaaatgaagggatgtgcattcttcttctagccattccagggctgctaataacagtggctagagcaggggtgtccaatcttttggcttccctggaccacattggaagatgacaaattgtcatgggccacacataaaatacactaacaatagctgatgagctaaaaacaaacaaacaaacaaaaacctcatgttttaagaaagtttatgaatttgtgtggggccacattcaaagccttcctgggccgcatgcggcctatggaccgggggttggacaagcttgggctagatggtatcagccacttttactatctgtgctgcatcatgttcagaccatgggacaaccttggaaaagagttacactcttccaacggaaatggaggcttaaagaagtgtagtaacccacccagttgctcatttctacctgaagagtacacaatatagaaacttccatctctcactggatattcaaattcagttgtacaaatcattcttgtcagaatgtgggctttgaaataaattggtaatagtttttaacttaatatttgtttcccaaatgtatttggccatagtctccccttttttgaagatgtccctataactccttgaagaactacagtgttttgtggaacatgacttacgaaatgttattagagtcatattgtataattgcagacataggtggaattcttgaattttgttttgcaggacttgtttaggtagagcatttaataacttcttttacgtgatgcttttcatatacattacaaattgttaagtatctcttatagcagagatttcttagctctatttgttatgcttaaaatatattttaattggtcaatatgttatatttttagaaaagtgagaaagtcctagagggtctcaagaaaattaaaggctcctgacattccattagtttagacactacccttgtttatagtttggtatgtcttgtagattgttcttcatgcagttatgcatatgtacacgtatggtatattaagtggatcatattatatttgctgctttataatcaacatttttttcctgcaactctgtatcctgtcctatgtcagttcaccgaatagtagagctttatgcctaagactgtgataggtgataggaaagtacacttaaaggacatttcaaggcagcattcatagtgatatgcaaaaataaatttccttgaatttttgggtgggggaacttacaagattttattcttatgaaatatgttactgctgtgtcaacactttgaaagagagaaattaattcagtcttgtgattgatacaccagagtggctttggcaattggtggcatgacatcaagtacaagtagggttccaaacagcctgttttatcgatcttgttgaatacttagctctctgacaagctctagcatggatatagttttttttttttacgttttcattatgcaaaattttaagcaatggaaagacaagtagtgtagtgaactctaatttacccatcacccagggtcagcattgcctctctcctttcaagagggaactctctcattccccattgcctcacttcaccttttgcctcccagattattttagaatcaaattcagacatataatttcaactgtaaatattttattagctatctctaaaatagaactctaatgataacgtgtttgtgttttaatatctagaaaattatttatcctcaaatatgttgtcagtgttaatagtttctctggtgtctcattaatatgcttttaaaataatttgttttaatgagcatacaaatgagggtcatctacattgtaattgatagatctcttaagccacttcccaaacctccatttctctttcttggcttcactgggtgatttgtcttgaattcctgtggattttgctggtggcattttcttggtggtgtttaacatttatctctgttccccatatttcttgtaaattggtaatgacaaaggtttagttaaattcagctctcccaccttctctttctcatttctgttcttttttgaaagaatatttcataactagtgttttgatggtagtacataaagtctcatttcctctctgtgattttagcaatcattgttgattgttttctaggtcctttttttcagtgggagttgcagaatagctatattctgtttcttcattcatattagctagatacagtttttatcagaaaggcggaataaatgtttaattctttatttgctagtttttaaatagtgaattggttcccaagaatcctccagactgaaagaatgagtgtttccctgccccccgcctttgggtatcactacgaatgcatttaaacagttttatatgtttccgttcattgaagatattatttttaactggcgctcaagttgtttggccattggagggacttcttcacattgacttctaaatcttttcaacataatcctagtagatgggaatagtaactttgccgtctagtgtagtgtgatatgacagtctgcactcttgtgagaattcttcctcagacttggaatcagccaattttttagggaagctttgttaacaaaaagtgacaaaaaaaaagagagagagagagaaagaaatagtgcagagattatagtctgggctctagtgattctcattattgtaggcttttcagagctgtgaaatacacacgaatattttcacaagctcattctcattaaatttaggactataatgtttttatttaatcttctatctgtatcttattttctcactgaaaattctggttcctagtgacacaaaataatgattcatttgctttatttcaaaaaaggaatacaaagcagtctcagaataactataaccactactaccagtgatacagttggtgacaattttacactgagctcttactattttgagggtatatccactagatacaagttaccatctcttaaagcagctggaataatttttactatgtaacagttgtgctagtatatagatccatggttaggttcatttgttgcacttgattttctagttgtggaaattgcataaaatattttcctgttttctaccttagaatatttacatggttccaaagcaaaatatgcaaagcagagaatttttataaagtatggctttcatctcaggcccatttatttacctagtcctcccttgctgtttgggtagattttttatttttagtttttggtttatccttccatttctttttttttttttttttaaacataaacagttatgtaacagttttgtgtgtgtatctgtgtataatttctcactcttcatagattattatactctcagcactttttaatacctttattatttattttcacttaatagtatattgtggtcatttaatgggagtgtataaagaatagcctttattcgttttttttttttttgccgttacaaaaaggtatagtgctgtgttgaaaagtgtttcttgaagttgctagtttatgtttgaatagaattgtagaagcaggatcgtgtgtggttttattagttagtgctaaattcctccgtcttagggtgatggtttgcgttaccatcagcagtgtatgagagtagcagtttccccccagcttcacaaaactttgctctgttgtgcaggagattgagcatctgttaaaggcactttcaaagaagttatgctgtgtgtgtgtgtgtgtgtgtgtgtgtgtgtgttgtgtgtaaaagtcattactgttatgaacactgttaccaccttcagtttcccaactattgtttgtagtgcgttttttaatattctgactgaagcagtttataaataatggttagacttacttgaaatggtaccattacaacatgtcttaaggcacactaattgtaataacttctggctgggcttaagaaactacttcttaaatgtttttaagtggaaatatgctttgatttttctgtaagcttaacaagcttttctcagctagggttcctcatctgaaccacagaaaataggaattatttcattttattaaagatgactcatcaagagaaccattatagttacacaggagagaagttaaccacatataatttttatgtcttgggctgggcattgaaatttgattctcatgtggaattcttagttgagaaaggtgtaccctgtgagaaatggtttttttctcgcattttatattactgcctctccatcaaaccatatatatctccccctcttccttcagcctcccttattggtaccatttgacgagatgattagggagtaggaactgttacaggttgtttgttagagggttaatcttacaaattgtattcttatcaactttcatgaatccaattgaatagtagaattcgctatgaaaacagatgagttgctttagaaaagtggcaatgaaatgtatactcttgtataacctggtttagagggaaccttattaagtcatcgagtctaaaccatatttgtgatacttaattccatgatatttcagtaagtagtactataaatgactgttagtcagttttcattaccttctaccatagttaatttaatacaatctgcggcagcagttatgtttttgaatgcctgtgattttttaccctcaaggaactttcacccctggaagactgatatattgacagtgaactgatgcagcggagatgatatatacattgtgcaggaagtcaagaagtaatgtgttctttgaaggttgaaggtttttaaaggaagctggagaagattgaagtaggagtttaccaggcaaataagtaaaatggtattctagacatcagaaatagaatcaaccagggtatgttgctatgtggatgcttggtgtgtctcagtggaaggtatggggcacagtggagtgttggtattggagataaggctgaggtctgaggataaaggaccatgaaccttatatccaaatttatttcattttgaaagcagtgcattgacactcttctcttttaaagatgagaagttatatgatgtattaattgttttggaaaggtaacttgacagtagtggaagagatggacagaagtgggaagtgactaaaggcagaagacaaatgatcaagtctcacacaactctgcctagaaagttctttcttgtgttaggataaaatctttgaaacttcagtcctctgatcttaatctactttgaattcaaaacaaatataatctcttaaactttagagactttgacatatttaatgacagtgcttgtcttaaaggtgttctgccctagctaaaagtttattgcctagtagccttagttctcttttttgttaagatgtcatgtgatatggtgttgaattcaacttcaaaagtggtagattggtttgtttttaaagagaaaagaagacccgctatccttttcagtgcttttcaaactgtctgtggtaagagacccactaaaaaaattcaatccattatatcttttggtgaaatacaataaaattagttaccagagaagtggagttttaaaaagacatatatttaaccccatttaaaactgtcttttatcaagagacataaaattatcctgtcagaatgctcaaagagtttctgaacaggcttgatttctgtacttgtaggctgcacttccggccgcactggtttaaatgccaactgtgacgtggtatgtttgtttcaggattgtaaactagctccctggtgtccctcctcctctacttttgttcttctcactccctcatttttttttattttttatttttttgctctgtgtttataaaataaaattcattttagattattgactagattatttttaagtttgatttctggttacatgttcattaaggactcaaatggcttagctttgttttaagatagaagagtacaaaacagtgcaataaagattaaatgtttatttccgggttgataatatctcagtacatttatagagtggagtcactgctttttgcccattgttaagaaagattgggaagacttgaaataaaaaatttatttgaaaatacatttattaaaatttgtgagacaccctttgagaggtaaaaagatggacccaataagaatagacttttgtttttattagtaaagtaatactttaacctgtaaaacttcatctcattactcagccatagatataactccaggatgagttaattgcccatgtctaatgaaatgagacgtgagtctcagtgaaaagggagagtccattttatcactagatgctcttaatgagccttttaaaattaagtcttgattggattgcagtcaatttcgttaaggaatatttgagcatcttgtagttgtgtcttatgtaacattttctttttagaggattcagctctctgttgacagagtgagtagtggaatgttgctgatgtgtattaatgctgcagcaattgatcttttcaaaacccgttaaccttagttggaaataatttttcagtctaatatattaacaacaaattattaggccgtttcataagcctagggagccatcctattctatcctattagttttagttttctgtttatttcttcagttatgagagaccactattaaattattttgttgttctttagattttaaaacatgtaattgttaactctcgattttaaatacctataatttttagtttggtgtttttaaatcacaggttgttataggacatagtttgtggggctgtgtttaatgtttaacaacaattgtgaatctcagattgttgaaattattcttcattttgtgaattgttacgtttaactatttttaaaaacagtaatagaaattatagcagatagtgaagaatgtttttaaaaaggtctgcaaaaacttaagatttttggtgaattaaaataagtataaggtagtctaaatatagaggactagtcacttcaaatagaaaaaaattttcttaaaaaatctaatgtgaagaaaatttggagtaattttatctttgtaactaataagattaatgtttgaataataatttgtgttatctcagtagtgagattattgaataatagacaagtgagtaaacggatgcctatatggatgcttcagggtgtgtaatattatcaagtgttacaacagcacattgtttagaacgtttaagatttaagacgagtaagtactttaaaaggagtcaaaagaagtgaaagcaaatactgaacctcatcttttataacataaaaatgaattttttcttaattatgaaagcctttcacgtttagtgtagaaaaaatttagataattctggtattttaaaaatctaatcttccccatttagcgccgttacttatgtgttaatacatattttgagatctatgtatttgtgacctgatatattttgtttaagtatattacgtactaaaaagtcatctacaatactttttttttttttttgagatggagttttgctcttgtcactcaggctggagggcattgggcaatcttggcccactgcaaccttcacctcctgggttcaagcgattctcctgcctcagcctcctgaatagctgggattacaggcgcatgccaccactcccagctaattttttgtatttctaatagtgacggggttttaatgttggtcaggctgttcttgaactcctgaactcaggtgatccaccgcctcggcctcccaaagtgctggaattacaggcatgagccaccgtgcccagcctacaatactttttaatggttataagtagcatttaattgtacatatgtgtactgaggtatattgtttgttgaagttttaaaataattgtttttactataaaaatgctgtgaagaatatctgtactttatcattaagataaatgtgactgggctccatggctcatgcttgtaattccagcactataggtgggattccaccactgaggtgggaggatcatttgagcttaggagttcgagaccaccttggacccttctctaacttaaaagtacaacaaaaaaagataaatgtgtagaattggttggttgaaaatgcatttcaaaattgcctttcaacttcactgtttgaaattgtaagctccctcagaaaatgaaaatgcttatgtaacgaatcttctaaaaaatcacttttttaaagggacaaaaatatagacaaaaatacaacaaacatacttctggttaacaaggttaaagcttatctgtttcacttgtttattgcctaacattgctgccatctgtaaacccccactttgtattttcttttcatcctcattttgaaaaaataaaaaattatacatgcagaataattacaaggctaacaaagtgaatttgtgtataccttcaacctaaatttgctgtataccttggccctccatactgcaggccccacatcctccaattcagccaaccacagatcaaaaaatattcgggaggaaaaataataaaaaataataatacaacaatagaaaataatacaaataaaaaatatggtacaatgatttacgtagtctttgcgttgtattcagtattttaagtaatctagtgattaaagtatatggaggatgagcctgagttctgtgcaaatactgtaccttcctatatcagtgacttgagcactggtagggaggcggtcctgggaccaatcccacagggatactaagggacaactgtagtaacgttttgttcatttgtgtgtacacacagtgttgattttttatttggaagttcacctacttgctgaaacttatgtgtaaccctcaaatcattactggcgacactttcacggtcattcagacacgcacacagtggcaataaaaatctgagtcacccaaatgctcttttttgatattgagatagaacaagatgacacaccaccacctttttacttcagttcatacactgttaaaaaaagttattttcatggtctgcttagtgtcacgttttgggttttttttttgtttttgttgttgttgttgttattgttgtttttgtgttttttgactgtttattatgattttgctgtttaaaatgtccctcaagcatagtgctgaggtggtgtctaggatttaggattcctaacagcaagaagactgtgtgtgatgtgccttatggagaaaatacttatgttagagaagcttagttcaggcatgagttaactgctgttggctgttgaatgttaaagaatcataaggtgtctttttttattatttatttatttattttttttttgagacagagtcacactctgtcgtccaggctggagtgcagtggcgcgatcttggctcacattaacctctgcctcctgggttcaggcgattcccttgcctcagcctcccaggtatctgggattataggagcgtgtcaaaacacctggctaatttttctgtttttagtagagacaaggtttcaccagttggccacgctggtctcgaactcctgacctcaagtgatctgcctgcctcggcctcccaaagtgctgggattacaggcatgagccaccgcgcttggcctaaataaggtgtctttgaacagaaacacatataaaactgaattatgtattgatggttgatgaaaatgtgaccagaggtttgtgggaaccaaccctgtatttccttgaggagcagtattggctaattcagtgttcctggtgactttaccacaaataatgagagttgcgtgtgtgtgtgagcatgcgcgtgtgtgtctgtatgtatgtacatatataaaataattattaccgtttgctgaatcatttgagagcaacttgcagacattatgatccttcatccctgtcttagagtgcatttcctataaccaaggacattcttttacatagttactttatcaaattctgaaaatttaatattattacaatattgttatttgatggacattctaaattcaaattttccaatttttcattagttgtaagttctttctgattcagaatctagtccagatcacagattacatttatttgccctgtctcttacagtgtaatttggaacagttcctcagacttttcattatcttttataatttgtgtgtgtctttcttcatgactagattcaggccatgcatttttcacaagaatgttttaaaaagtgatgttgtgtccttctcagccatcacattagcagttagatgatgtcaatttgcctcatttttgatgttgataactgatcatttggttaaagtagtgtgagttatgtattgtcaccgtaaaggtaactttttctccttttaaatcatatctgaggagaaatactttgaaactttgtaaatattctttcctaacaaatttaggattgtaatgtcttttgtccaattttcgtatcattccctttacatttgttagttaacatttaattgtaatgaatatattgtctgacatttctaataggttaagatctctttcagtattacatgtattcttgcatatcccattcgtttgctgattttagagtctctctccttgacttttacactgcttgatatctttacttggttagatggtgatagtagtggttgtggtgacaacaataagttgatgttattgttaagggcttcaacacactgagctttgatttaggcattgttatcagtccatgtgaattaacccatctagtcctctgaaagccctatgaggcagttattgttctaattttatagatgaggaaatgaagcattaaggaggaggtaaagtaccttctgtggctggtgagttgcttggccccaagatatgaacccaggctggcttgagtttaactactacattgtgcctttcctctaagtagtcttctgatttccttatttccattcttccgcccttttctcttttcagcaaccagagtgaatttaaagaataatcttctagcatattttaatgtattcagttagagtcaggtctttactgtggctaaaggccctacgtggccttgtagcttgctcctccctagagttttctactctttgcctcctctttgtgtattcctcgaacatacacatgctctcatcatagggctttggtgttgctactccctctgcctggaatactctgcccttatgtatgtgtaaacttgatttatccctttatttcagatcctgttgaatctcacttttcagagagactttccataaccacttggcccccatagagtaaaccttcttgcccttttgctctcttgtatttttcatcttaccatcaacagccctgacatgttctacatatatattactaccaccctcacttaagggaatatgttcattgagagcagaattgtctcttttattcattgttctgtcctcagtaatagaattgtacatacctgccatgtagttggtactcagtaaatatgtgttgaaggaaggagtagtttgtcttttaattttgcttataattattttgcataaagacattattaattgaatattttaaagtatattttattgtggttttgtggattctgtctttagtgttgtgctttaaggcctttaccttgttcagtagtttatatagatatttgccattttgtgccatcattagttttgttctagcatttgttcagttaaatcttaaattcttttggaaattcattctctaggggaagattggaaatttcgctctttatcaattattttgctgtttaaaacaattttattgacttaaaatttttaaaattgcttttaataattgtatagtttacttttttctgtatgttaaaaatgaaaaattcacatttgaaattcttaattcagtagcaaattttttttaacttattaaagaattttttggtgcagtgttttagtctttggaggaatttgcttttactgtataagtaagaatttactcaggcaattagttctattttatctagatgtgctatatttattacctaatgacctaggaaaaaataagagtagatattgtttgttaaaaaaaaaaaatccatgtttttgttaaaaccctattacctttgtattttgatagcatgcttaatttttcttctcagtatagctttttggaagagtggcattaagttttgatttgcctaggatagttttagctatatttattgtctagttgtaattactaatagcatctccattcacttccaaaacattctggttgagatgaaaacttacatagtcaccttcacatttgggtgttgttttagtgtttgtgacttctacaaaacactagtgtcattcttaaatctacttttgttactagctatcatgggatttgttaaggagtgatactgcggccttatgaagtttttgatataaaattaaaatactactttaaaaatttctgttactgtattgctgttagaataagaactaaattttgtatgatccttgaagaaaataagttatggaaaaatatgtaaatcagtggatgtttttgtcctccagtagtcttatttgcttataggatttaattcatgttcttcattagtttgctcctaccgcagctgtggtaaaaaaaaaaaaaaaaaatgtatatgtggaaggtatcctcaactcctttctgccctcagtcatttaacaaatttgcacaattgtacagcacagataaagaccattctcagtgttaaagaaagttttattggacaatgttggtttaggcagagcaactttatacagaaaatttgaagaaataaaagtttggacaaataattcctgtttgtaattttatgttttgagataattttaaacttgcagaattataaaaacagtacaaagctctcctacacacctttcacctcacttagccatgtgtagcatgttaccatatgtgactcttggtgcattggccaccatgtttgtgtccctcatcccccttcactttcaggcccctcccttcttccttttgttcttatgtctgtctccctctttccctcctctccccttttaagttggagtaattccccagacttagtttgtttttttcctcacattgttttgaagaatattacactagtttttagaaataattttttatgattaaaaactgattctagatatttgacaggtttgtacgtgtgtctgctgttagaatataaaactagactctaagcgtgctcattttatttttccattgcctttgatatcatatgaatttagttatacagatggagcatccgaaatgcttgggatcagtaatgtttcagattttgggtttttttggattttggaatatttgcatatatacaatgagatatcttggggatgagaccgaatactaaacacgaaattgattcatgtgcacatagcctgaaggtagtttcatacagtattttaaattttgtgcacgaaacaaagtttgtgtatattgaactatcaaagggcaagggtgtcgacacaggtatgcagttctacactgcggcatcatgtcagtgctcaaaatgtgtcattttgaagcgttttgtttttttggattaaggatgctcaatctgggctcaattacactggtttcaacgtgttttgctgaaaaactcttgcagtattaaaaataattcaggaatagtgatgattgaacttatttgacttctattcgtgtttacctacatgtatgacatatcttggaccaatttgtaatatttagataggccactgataaaccaaagctaatctagacacagcaagtgagtttttttgacgataaagagatgaagatagtcattgactcatcacttttgaggaattctcctttgatgatatgattaaatgtaaaagaagaacattttatcaagttggcaaggaagactaggacactttgtgacattaagtgctaggcttgattaaatatatgctaaaacgtgaatttgttttgttagcatcactgacagtgtacgtttagtttaacatttaatggaaataattcaaccaagtcctttgtctccctcatacaatgtttccagtatcttctgtgttgtcaatcctgtcctcaccttctaaaaaatcaagctatctttattcctttcacatgttctacccacccgccaccccctagactattctttcttctacttttcaaagtttgttaaatagtttagtaagtattttttatttcctactctggactagacacaaaactgggaggttcttgctctcatggagcataatttaggaagatagaagctaaacaattaaacgaacaaaggtaatttcagatagggataagtgccatgaaaattataataatgccaggcaatgtaagtatgggctgggtggaaggcttttaactaggagggccaatgaaggactctgaggaagttacatctaaacagagactctgatgggtggttgacatggggaggtctgcagactgaatgtttctgggtgaagttagagcaaaagctctcagttgtgaatgtgatgggactgtccaaggaatagcaaagtcagcaagggtggaaagtgggaagagaagacgtttatgtccctgttcatatgcttctctataggcttggtaaaattttattggaagtaccaggaagtcagttgatggttttaagcagagggatgatatgatatttatttttagcaagagttgtctttagcaattagagacatgtatgtgtgtagggagttgggcaagagttgaaggaaggggattcattagttggctgttgcagttgttgaggcaagagatggtggcatggactgggaatcgtcttcagattcattttatttccatgctgttagaattcttcaacatttgctaatcttggctgaatttccaaagcacttgttctctaaatatacaatgtaatgtttatatttattgtttgcttttgtttccttacccaggctgtcttcttcaggagggactaatttatatttccaatttcctcaatgaaatgtggacataattggtgcctactaaaaaaattatgttcttcctacagaattttacaggaaatttcttattttctgacgtagaggagcatcaaataatgcatacacttagaaatttaaataaacaactgaataagacttaaattacagaatagagaaaaaaccaacaaatactttatgaattagttggagtcgaagttaaggaaagttgaatgtaaaacctaaaagtaaaattaattgctaagctagaggcaatatgtgagcatattttgcaaagactttggtggccatattaggttttcaagccacgcccacacacataactgacaatttttgatacttatgaagtacaaattctcccctccaatgtatgcgtgattctccatagtaacacccacatgtagcttctgatagaaacccacaaaataagatgaaaatagtttctcagtcaaatggttggaatatttagtaatacttggcagtattttttattttgttaataacaggtgtcatttaatacaatgacttttaaattatatattaaaagaaatttttaaaagttttatggcaagctgtgaaatactcagatggataatgtgaattaaggcgtgttctttggccactcaaagtgctccccacccaacactggcatggactgctcactaggtggccaaaagagatttcgtttatggatgtgttttgaatgttttaacattaaaaaaaaaaaacccaaagcatttgaggcagagatttttttagacaatagttgtttaatgagctgcttgtacatacaagagaagagaatgggcctgattgctcacaatctgatgtttgaaaagtatttttctggatcttatgcatttgcatatctaattgctatgtaatcaaaactaagtgaactgtagctacttgaaactctaaaatgaaaggcaatcatcttacggggaggagggagaaccccgttccatgcaagctagcctgaatattagcattatagtcttcttgtgtttaattataggtgtctgactgagcagtaaatttatgcttgtgtaataaagaaatgaatgtgaccctgaaacaccagctcagctttgttgtaactgagcattggctttgagagaagttagcatccattgtgtattttggtgataagggattgtgccagaatggctgttaattacgtactttatgtgatacagaaagtagtggttctacactttctttccaccagtgacagcactcaattaaaacttgtattaagcagctataatgcctttatttatctgtttggaagacatgaggtgaagaaaattaactttattttttccagctgtttgttggcagctttgtttttggtaaatcctttgaggataaaaaactgtttgttatgtgtcctgtatgctttcatagactaaatattttattttttgctgcctcacaaaaaggttattaagagatattttatattcttgccgggcatggtgcctcacacctgtaatcccagcactttgggaggttgaggtgggtggatcgcttgagctcaggagttcaagaccagactgggcaacacagcgaaaccccatctctacaaaaaatacaaaaactagccagacatggtggcctgtgcctgtgttcccaactacttgggaggctgaggtgggaggatcacttgagctggggaggtggagatagcaatgagctgagattgcaccactgcactccaacctgggttaaacagtgagaccctgtctcaaaacaaaacaaaacaaacaaacaaacaaaaatatatatatatgtatattcttaatattggttaaatgtcatttagaagccttgtagactagttaaagctttttatatgttaacccatttgaacctaatgttgagtcagtaagcacttctcgatgatttaaactctgagagagcaagttcaacctggaccaaaattaagataaagtgaatgtttatccccctgccccccacctaaaatttttgtgcttcataaaggggctccattgtaggttgaatctaagagaaaaatagtgattgtatttatggcaaacttgaaatttatattatcattttgaacttattttatacatgaactcactaatttccacaactgtttatttggtggtattccatggtatgtatttgctgcattttcttcatccactttactgttgatggtcaccttggtggttccatgtctttgctgttgtcagtagtgctgtgatgaacatgcaagttgcatgtgtctttttggtagagtggttgttttctttcggatgtatacccagtaataggattgctgggtcaagtggtagttctgagttctttgagaaatctccaaattcttttccacagtggctgaactaatttacattcccaccaacagtatataaatgttctcttttcctcttagcctcaacagcatctatgtttttttgcctttttcgtagtagccattctgacttgtgtgagatggtatctaattgtggtttttatttgcatttctctgatgatagtaatgttgagcatcttttcatgtttgttggccccttgtatttttttttttttttttttttttgagaagacacttctcaaaagaaatgagatgaggctggtctcaaactcatgagctcaggcaatccacctgcctctgcctcccaaagtgctaggattacaggcgtgagccactgcgcccagctgctaatttttgtatatagtgaaagatgtgggtctaatttcattcttctgcatgtggctagccagctctcccagcaccattgattgaatatagggggtcttttccccattgctttggcccactttttaatggagtcgtttttttgcttgttgaattgtttaagttccttatagattccagatattagacccttgttggatgcgtagcctgtgaatattttctcccactctgtaggttgtctgtttactgtcctgatagtttcttttgctgtgcggaaactctttagtttaattaagtcccacttgtcaatttttgtttttgttgcatttgcttttgagggtttagttataaattctttcccaaggctgatgtccagaatgatggttcctaggttttcttctaggattcttacagtttgaggtcttacattttaatctttaatctgttttgaggttttttttaaactgttattttttggagacagagtcttgctctgtcactcaggctggagtgcagtggctcgatcttggctcactgcaacttccgcctcctgggttcaagcaagtctcctggctcagcctcctgagtacctgggactacaggcgcccaccaccacaccgggctaatttttttttgtattttagtagagatggggtttttcagtgttgcccaagctggtctcgaactcgtgagctcaggcagtctgcctgcctctgcctcccaaagtgctaggattacaggtgtgagcccccacccccagcggttaatttttgtatattgtgaaatttgtgggtctaattttattcttctgtgtgtggctagccagctctcccagcaccatttattgaatgggggatctgttccccattgcttatttctgtcaaaattcagatggctgtagatgttctggttctctattctgttccattggtctttatgtctgtttttataccagtaccataatgttttggttactgtagccttgtattatagtttgaagttgggtaatgtgatacctctaggtttgttccttttgcttaggattgcttttcctatttgggctcttttttggttacatgtgaattttaaaatagttttttctaattctgtgataagtgatgttggtagtttgatagaaatagcgttcaatctgtagattactttgggcagtattgtcattttaatgatactgatttttccaatccatgagcgtgggatgttttttcatttgtttgtgtcatctctggtttcttttagcagtgttttgttttgtagttctccttacagagatcttttaacttcttggctggatgtatttctaggttttgagggtgtgagtttggctgtcgtaaatgggatgcattggctgtcagcttgaatgttacaggaatgcaactgatttttgtacattggttttgatcctgaaactttactgtgaagtcatttatcagttccaggagccttttggcagtctttagtgttctctaggtatcaaatcatattgttagcaaagagagatagtttgacttcttttgctatttggatgctttttctttctttcttttacctggttcatctgggtgggacttgctcctcttctttttaaaaatgtttattagctctgaatccaagcatactattaaacccattttaaaaacactgcttacacttctttgccttctgaaaaccatgtttcctaatattttgaggaaaaaatgggtgtccggcattccagcagctccagctctagctgtagcttaaagggcctgaggtacagcttgggctgttacttcagaggacacaagccccaagccttgggagcttccatgtggtgttgggcttgtgggtgcacagaacacaagagttgagctttgagaatctttgcctagatttcagagaaagtatggaaacgcctggatgtccaggcagaagtctgctgcaggggcggacccctcatggagaacctctgctacggcagtgcagaagggaaatgtgaggttggaacccccacacagagtccccactgggtcatggcctaatggagctatgagaagagggccaccatcctccagaccccagaaaagtagatccactgacagcttgcactatgtgcctagaaaagctgcaggcactcattgtcagcccatgaaagcagccgaggggactgaaccttgcagagccacggggacagtgctgcccagtgctgtgggagcccatcccttgcaacaacgtgtcctggatgtgaaacatggagtcaaaggagattttggagctttaagatctaatgactgcctacccgggttttggacttgcatagggcttgtggcccctttgttttggccaatttctcccatttggaatgggaacatttacccaatgcctgtacacccattctatcttggaaataactaacttgtttttgattctacaggctcatgggagaagggattttccttttttcagatgagactcagactttgacttttgggttaatgctggaatgagttaagactttggggaagtaactagtgggatcttatggatggttatgaaatgtgaaaaggacatgaaattttggaggggtcaggggcggaattacatggattggctctgtgtctccacccaaatctcttcttgaattgtaattcccatgtgttgagggagggacctggtgggaggtgattggatcataggggtggttttccccatgctgttctcgtgatagtgagtgagttctcatgagatctggtggtttaaaaagtgtttggcagatgtgttcccaccccgcccgcctccatcaccttgtgaagaaggtgctcttttccccttccaccatgattttaaggtttctgaggcctctccagccatgcagaactgtgagtcaattaaactacttttgtttataaattacccagtctcaggtggtacctttgtagcagtgtgagagctaatagaggtatcagagagattttcattattcttgtgagattttcccaattgaattgacatttcagttgttggtctgttgaataatgaatgcactataaaagtggttgttaaaattatgataagggaacaagatcagtcagtaaaatccatgtatgggagttttatgattaagaatatttctgtattttgtacaggacatctgtaaccacagaaaattgcattgtacaaatgaagaagaatacccttttacatcacatgatttgtgatatctggaaaatctcccaagcacctggtttctggattttatttagatttttcaatgtattttctaagtcttaggcaatattttcagaaaagttagttctttcctactcctttgatcctataacttagccacatcattacttaagcacttagtctgctatagtggattacagagttctttaagagttgtaactcttatcttaaccactataatgtgcatagtgcctggcacattgtagacacttaggaatgcttaccatgacccttagtattgtatatttgagttaattgctagaatttttaatatctcctattgaatttattaatactattttcatacataagtacacccctttcagtgttgtgttttaagattatattacccacttcattcctcccatccctcactctcacccaccaatggcaactttgattaacatgtttgtgtatagtaatcctgtggccacaagcacatagctgtaagcaaggactgaactagaagaccaacttgattctgcgatgattaaaggaaaaatggctaggaaattgactttgaacatgagtaatgggcattgaagccagtctcacaagagtaaacgatgctttgggtgtgctgtatcacctgtgaatacagcctaaaagttatgcctgtcaccaaggaaatgtttctggttgcaggaggactggagataatactgtaactagaactagggccaagctgccaaatggcctgaatactggattattgatatttctatggaagaatgggctttgaactgccaaaataagaacttgagggtttctgtttccggtaatgaatgagtaaatttctgtcatacttaatcccctgcaataagcaactctaaaatatgcacgataaaaaccagctactccaaggaactctgtaggatgagtgtaagcagagtctgaaatagagttggtccttgaaggaaggaagttagtacactgaatactagttttcctggcttttagcctgaggcaaagcacattaggtggcactcattccaacccagagaaatctctgctgatggagaaagataaaaagaagggaaagaaaagagaacgggaatccccaaattgtagctgaccccaggattatatgtgcagagtagacataagcatctcatctaaagatgtgaactaagaccatagttggcacctgagaaacaaagtgtgcagccctcaattgaatcaagatattgcctactacaaaacaaaacgaaaacaaaaccagaaccagaaacaaaagaaaaaaattcgtcaaaataatctagaatcaggatacagtttaaaattaagctctgaaagtaaatcatactctcaaaagaaaatcagctgataccaaccattacattttggaactaagagacagattttttgtttttgtttttttaaatagctgttaactagtctcataaggacaaaatacagaaagacagttcttacagagaaatagaagcaaaaaaaggaaccaatggaaaatttaaaactgaaaaatagaatatctgaaataaaaaattcactagatgacataactgttgaggaaagagtatgtgaatttgaagaaagagcaatagaaatgttccattgtaaagaacaaagagaaaaaaaattgagaggtaggaatggcctgtgaagtggtctgacatatgtataattggagtcttagaaaaagagggtaaataagactgaaaaaaaatacttgaagaactaatggcagaaaaatctcacaaatttgatgaaagacataaatatgcaaattcaagatgcttaagaaacagcaagtagaatgaacacaaggaagactacactgagttacatcagagggtaaaactgtgaaaagccgaagattataaagaaccaatcatgaaagcagcaagaaaaaattacacaccatatataggggaacaatgatatgattaattgctcacttcttatcagaacatggtagagagccagaagagagtaaaatatctttttttctttttcttttctttctttctttctttctttctttcttttttttttttttatgatggcgtttcactcttgttgcccaggctggagtgcagtggtgcaatcttggcttactgcaagctccacctcctgagctcaagcaattcccctgcctcagcctcccaagtagctgggattacaggtatgtgctaccacacccagctaatttttgtattttagtagagatggggtttcaccatgttgcccaggctggtctcaaactcctgacctcaggtgatacacccacgtcggcctcccagagtgctaggattacaggcatgagccaccgtgcttgggcacttttacctttttaaagatattttactggccgggcacggtggctcacacttgtaatcccagcactttgggaggctgaggtgggtgagtcacctgaggtcaggagttcgagaccagcctggccaacatggagaaaccccaactctactaaaaattgaaaaattagctggacgtggtggcaggtggctgtaatcctagcttctcaggaggctgagccacgagaatcacttgaatccgggaggcggagttgcagtgagccaagattgtgccactgcactccagcctgggtgacagagtgagactccgtctcagtcagtcagtcaatcagtcagtcaatcaatcaatggtaaaagtaagaaattgccaaccctgaattctataaccagtgaaaatatcttaaaaataaaggtgaaagaaagccattttgaaatgaaagataacagacagaactaattgccagcagataagcacaccaggtaatgctaaagggaattttacaggctaaagagaaatgagagcagatggaaagttgattacatagaaatttttaccctgatactggtaaataccttcataaagaggaaaataaccattttttttgctccttcccccttcttaatttctttatattacatatgaccatttaataaaggggggggggaatagtattgtcctgtggagtttttgattcttgtatgtgtacacgtggacgtatgtggttacaggtttctacatattatgtgaaacagtataatattgattgtaagtaggccttgaaaagttaaagatttgtattgtatcccctatagcaataactgaaaaagcaatgccaaaaggtatatgtaaagagcctttaagtataacttaaaaactgaaatggaattataaaatatattgaaataatgtatatatagatatattgttcaaagtccggaagggaagctaaggaacaaaatacagaggctacaaatagaaaaacagtagtaaaaatggtagataaacacctaatcattcaaaaattccattaaatagaaatggaagaaccacttcaattgaatgaaagagattgtcagattgtcatcatggattaaaaattaaaagcaaggctggctgtggtggctcaggcctgtaatcctagcacttttggaggccaagatgggccaattgccctgagctcaggagtttgaaaccagtctgggcaatatgttgaaaccccatgtctactaaaaatacaaaaaattagctggatgtggtgatgcgcatttgtaatgccagctactcaggaggctgaggcaggagaatcgcttgaacctgggaggtggaggttgcagtgagccaagatcgtgccactgcactccagcctgggcagcagagcaagactctatctcaaaataataataataataataataataataataataataataataagtaaactaaaaagcaagccaagtgcagtggctcatgcccataatcccaacactttgggaggccgaggcaggtggatcacttgaggtcaggagtttgagaccagcctggccaacttagtgaaaccctgcctctacttaaaaaatacaaaaattatccaggcatggtggcgcatccctataaccccagctacttgggaggctgaggcaggagaattgcttcaactcgggaggtgtgggttgcagtgagccaagattgtgccactgcactccagcctgggtgacagagccagacttatctcaaaaaaataaatgtacagtttacagagaaatactagacacaggtaagttgaaaataaatagattgaaaagcatattttaagaaaacagtaaaagattgaagtgactatattaatatcaggtaaaatagattgcaacagaaaaattttgtatcaggtaatgtggattcttcatagtaacaaaagttcatcaggaggacatatcaatcataagtgtatatttatttaatgcagaatgacttaatacatgaaaactgactaaaggcagaaatagttccacaatcagattgagattttaatgtaactctttcagcaactaataaaaaaaaattactcagaagatttgaaatttattattagccattcttgatcatattgatgtttattaaacgttatatcttacagctagagaattctcattcttttcacatgcatatggtacattcaccaaaacagagcatgctgggctttgtacatgctgggccataaggtacaaaggattaagattatatagagtatgaattttgaccgcagtggaattaaatttcaagtatttggaaagtgacacacttttttgtaatcagttggtcaagagatgtcaaagggaaatcagaaaatattttggaccgagtgattgtggaaatgcaagataacaatttatgagatgaagctaaagcagtgtttggaggaaatttatatatttaattatgttggaataaaactacaattatctaatttcctacctaattaaacatttaaagaaaacagcaaggtaaacccaaggtaatgtaaaaaaaggaaataataataaattcttgaaatagaatacggacaactagagaaaaataatgaaactaaaaagagttcttggaaaagttagttaagataaagctctaattagactaatccagaataagagagaagacactaattaccagtatatttaataaaataggagacatcactgtcgatcatatggacattaaaaggccttttaagagaatatcataaacagctttaagccagtaaattagacaacttagttgaaaaaaataaattctttggaaaacacaaattattacccaggagcaatagaaaattttagtatccctatattgattagagaagctgaatttgcaattaaaaattattccaccaagacaatgtgaagcctaaatggccacactaataaattttatcaaacttcaagaaagaaatattgtgaatcttatgtaaagtcttccattaagaaaaaaaaatgagaatacttcttaactcattttattataacaaattggtaactaccattgttactgtgatactaaaattcaacaaagataacagcaaaacaaagaatcagtattcttcatggatatagatgtaaacattttaaacaaaatttgagcaaattaaattaacgataaaaaaagaagatactgcattaccaagagaggtatattttgagaatgcaagtttagttttaacatcttgaaactaatcagtgcagttaatcataacaatagaataaaggtgtaaaactgtataattatatctaggagcaacagaagtatttgacaaaattcaatacacaaaaatgataaagcttcccagcaaacttagaaggaaacttcctcagtttgataaattcgccttatgaaaagacatagtaatatactcagcagtaaaattctcagtgtgttcctcctaaggtcacaaacaagccgaagatgtttgattttaccctgtctattccaatttgtactaaaggtcctagcaagtgcaataaagcagtaaaacaaaataaaaggcatacagaatggaaaagaagaagactttcttattttttaatatagaaagttctaaagtatataaaaaggtcattccagcaagaagagatcatgatcctaagtctctgtgtatcaagtaacatagcttgaaaatatataaagcaaaaactaccagaactaaaagtagaagctcagaagtccacagtcatactgttcacacaactcctaataactgataaagagacaaaaactcagtaagaatagagatggtctgaactacacaagtagcatacttcatttaattatctaattatcaaaaagaacattgcatccaacaatgacactatttacattattttaaagtgtacatggtacatattgtccagttgaccacgtgctggtccataaagcttcaggaaatttcagacatctgaaattattcacagtatattctttaatcatagtggaatcgagctggaaattaaaaactaagagttggccataaaggatgtatgttttaacttaagcatctggaaagaacagtagagtagattaaaagcaaagaggaaaaattaataaatagaaaatgtattgaaaattatatagtagtccttccttatccacagttttgcttttcatggtttcagttacctgtggtacagtacaagatgcttcgagagatcacattcacacaactttcattacagtatattgttatactctattttattgttgttcatctcttactgtgcttcatttataagttaatctttatcataggcatgtgtttataggaaaaaacgtagtgtatatagtgtttggtactgtccatggcttcaagcatccactgcaggtcttggaacatatcgcttgtagataagaggaggacgactatattgatgattaactaaaatgaaggaagtttctgtgaaaatttacaaatgagacaaactttgtaaaactgattaagaaaaaacaagtagaactaaacttgattgtaattattttatgtatcaccaacttggtgatacataaaatacacaaaacaaaaaagcagattaattgacagagaacttgcagttcacagagtttttatttgtatatgaataatatgaataggctttttctaaacttatttcgtcctgtcatttcattgtatcccatggtatacattaaaagaaaaatgtaagtgaaattaattagtgaatgcctaagactttttcgcagagttcagtatcagtttttagtcatgtttttcacaacatacagcaatctatactaccaggaatgttcgatgatgcagcatttttaaaagagtgacttactattctcctctagaatttcttcccaggccatttcaagtttttgtgcacattgttgtcaagaaatgtgaagcgcctaagatttttatcttgtaagataagctagcttgccaccacagtttcatggatgatggcagaagacctaggacttctgaatcagaagccatgctttattatttacagcaaaaatagtagcagagtgttagcatacttgcactgatgccctgagccctggtgtgcacagggtaatgcagaggccagacaacacctgctcttggtgggctggatttcagaagaggagcccagggccaaggtccccacaattcttgagcaagaagcagacaaggcagtcctctacccttgacctcctcagttgcatatgttactgcagaaactgctcagccagaggagatagataacccttgcactctggcacactcagtgggaacattgagggctgctcagagctcacccaacagtggttagacaggaacacctgtggcttactgctgcctagcttatggcattaatgagacacatcgggtttcaaaaaaaccttaaaatactttttaagaaatgtcttagaataggtgacacactgtaagtaagtgaaatcaagggccaaatttgaaatactgtatttaaaaaatcatggaaaatgcaacaaacagctttagagctatacatttgaaaactgataataatttatttatcttaaagatatgtattttcaaatctatatagtaaaatctagttagaaatcctaactttttttctggtggaatttaatgaattgattacagaattcttaagatagtaaaattgcccattggtagttgggacagttctaaaagaaaaatggaggagtgctttcagagcatttaattcttatcagtttcataattgtctgtatgactgagggataagcaggttgaccaatggaattagactaagctattttactcggatatgtatgtgtgtattgtggaaagaaagaggtagatggagagaaatttacatgagaagtgggaagcgtgaatttaataaatgatattaggatagttgaatttgcatatgcaaaaataaatcttttgatggatcacatgcccaaaaatgaagagcaaaaaactcaaccactagaagaaaacataggagatacatttatgacttcattgtaaagcaggattactgactagaaaacttataaaggaatatcagtagctataactacattgaaatgtattttaaaaatcctttttatgcaaaagacaccataccccatttaaaagacaagccacagagtgggagtgtatttgcaacatctgtaacaaaatgtgtatatttagaatttattaaaaattcattcaaaaacaattttaaaagatcacaaattcaattaaaaatgaacaaagtgtgtgaacaggcaattcacagggcagaaaacctgaattaaaaatgaacatttgaaaagatgctttaccttattaatactcaagcgaatgcacctttatatttaatgagaataatgtaccatttgatgtcctcaatgttatcaaagctatgtctaggatatggagaaatatgaactcccacacaagtcagtgtaaatagacacagacatattggaaagcaatttggcactgtcaactaatagtgtgtgtttttttttaagaaggtcctgtttgtggaaatttcattatgtgtcagtttcttaagaaactcttgtcacatgtgttttggaagatgggaatgaggatattcactgcaggattgtttataataataataaattggaatcagtataaatggccataaatggagagatggaaatataaattgtggttctttgtgtagcagaatattttggggcagtcaaaatgatgaaatttgatcaaatacacttgatttaacacatactacatcttgatactataacgttcaaaagaacagtttgaaattattctgtatatttgattagtgataaaaatatattggtgtgttacaacaaaagggaaacttacatataatgatatggcgataggtcattctatatgtgaagtggaatttcaagtgatcttatttctagtttattaaactttcagaaagcactttgaatattgaatatttgactttttctggcataggtaattagtgactgttttctatttaagatacaaaataagtccagcaattgacatttgctatgtaatcaaagcttttcactttttatttttatctcaaatcggtcacctctttgtggtataagctgattatttatctctcaaatctgtcacctcattgtgatgtaatctgattatttatctctcaaatctgtcacctcattgtgatataatctgattatttttaaagagaataccttttgatgggatagtaactaaatgtggtattctaggatgttaaggtaaattaagattaatatttgttttgtgggtccttcattaatgtctttccttaggagtgcaggcaatttttagaaaatctaaagtacatatatgcacacatgacactcaacaacatacatacattgtacccctcagtgtctacctgttgcttgcaactcaattatggggccttttttgggaaaaatgtagagtttctaaagcttattttatttatttatttttttgagacggagtctggctctgtcgcccaggctggagtgcagtggcatgatctgggatcactgcaacttctgcctcccagtttcaagcagttctcctgcctcagcctcccaaatagctgggactataggcgcacaccaccatgccccgctgaattttgtatttttagtagagacagggtttcaccatgttggccaggatggtcttgatctcttgacctcgtgatccacccgccttggcctccgaaagtgctgggattacaggcgtgagccattgcgcccagcctaaaacttcattttaaattaagcttgagggcttttatggtctttcaatatacctttaataccttgatgacttatttcaagaaagctttttatttttctggtcttaactattttccatatttattggattaatctgtttattaaataaaatatgttttcatactgaaatgaatactacttgcgttcttactggtgtagaggtgtaggctagagtatttgacattctggaatatattttaacttacttggctttaaaatactccttatcatactataactgttttgaaacacatatcataatgttagcctcttgggttcatgccatgagctataattatggtgttagtgccataatgggatgttataagttttattttagaatttttatgaaggtgaagctttaaagaaaagcttaacaagtttcaaccagagaagcagtaggggacacacacacacacacacactcactctctctctctctctctctctttctctctctctctctctctctagctctctctagctctctctgtctcccttattatgaggaattggcttgtataagttcatgctgactagtctagagtccacaaagcagatgggtaaggaaggaagatccagagggcactgttgtaaacccagttggtgtttggaatatctgagcttagaaaagaccaaagccctcttttaaagacttctaatggaatatgtcaggttaacccaggataatctccctgttgattaacttaaattcaactgattacttttcttaattacatctgcagaatttctcacagcagtatctagagtggttttttgttttttgttttggttttggtttttgacacagtctctagctcttttggctcaggctggagtgcagtggcttaatcttggttcattgaaacctccgtctcccaggatcaagtgattctcctgcctcagcctccaaagtaactgggattataggcgagcaccaccacgtctggcttagattagttttttcttgagtagctgggagaaggtatgtgtatgctactaaatggccactgttttccatttatagtccacctcttgaaaaaatatactttatagaccatcccaactggaaacatacaagaaatgaaattctggaaactctagttcagcctagttaagctgacacactgcaaaggtatcacaccggataactaacttttttccctaaatagtgtctctctttattttgtcgattgatattaaaggatattttcattgatgagtgagggatataaatttaggtgttattagatgatacacagctatttctagaaggttaaggtaaatctggtaacctggtccttttttggcttgtatttagcttatgtttagtaaatgggtttacctgcccctgccctacatattctttgatttcctccctggcaccaatttcatgtgtttagtgtacaaactccttttaatatttattgtgaaggaaagtggtaattcaggaggtttttgccaaagtaagattctagtttattagaatttgtgtaatctagagagatgtctgattcttatcttaaatggaaaaaagctatagaagctggctagggaaatcttgtttttcaggaaaaactcacatccacggaaggtagttgagttcatttctttatttccttattcaacagacttcaaaaaaatttttcctttgtggtaggctgtgcgctaagtgtttgaatatccagtcaaagataagatacaatcaatgcctgcccttttgtagtcaggatggacagatacaaattttaactagaaggggccgagataagcaaaattggaaatcatgttttacatagatactgttttttgtgggtccatgttcttagttttttccagtaatgggtataattgagaagagccacagactcatttctaaagtagtcattcaggcttcttgcatataattttcaacactcttaaaaaccttatgaacattttaaggaagagagtattttgtacctttttgtgaagaaggctttattttggctgttgatattaaaaaatattatatttcattgatgagcaagagatacaaatttaggtgttactaactgttgtcattaaggtcaagttttatacatgtaaataaattgtagtttatgaactgcagacatagaggttgaggtttcatttattctgtagtagattgtagtaactactctttcagcatgatttacaaagaaaatcaaactaactcaatttatagattgcccttttccatagaatgtcaattttgtattttggcaagaatacctgtgaggtaagcctaggaggcacataacaattctgccatttccaactcttccaaaatgtaaataggtatttagagttacacaccttgtatggctacatgaatttatttatagtcttttctttttagagtagcatagcgacaaaagtagtcactggactttctgttcagtgtgaagatctgttggtatgtgttctgctttattaataaatgtagagagctgaactagagagttgatattcattgaacatgatatatcctctccctttccccaatcagattcatttcactgaataaacacctgagtatgaaggttatttcaagaagtgctgggcaggaatcctaaccttcagtagcacatagtactatgaaatgaaatgatatgtagacatgcagagttccttataaacatatgtcattaataagaacacatgagtaggactgttggagaaattcaggacaaaagagctcttaagacagcttgacaaaaggggacctcagagatcgtgccagatttcctgtgggccttaaaaagagtgggtgtgatgatatttttatgtggcacagtggcgacagagatgaaataaggagtcagatttgagttcaggttctgggccttctatttatggattgaaggacgtaagacaagttacttttgctgttgaaattttcacatgtgaaaaataagttaatatctaccattcaggcttactagatattaaaagtattatttttagtgttctttaatactattttagaatacaggcagttgatagatcctgaggtgtctatggtcgttttcaaaaagatgttttctccaattataatgattactattaacatttaaattgacccttgctctcataattaaccacaataattattaatgatagcttactttttaagcattatagttattttatatagttgttatataaagtttgtttaatatctcagaaaatgtttttcattgcattcacattttagtgttgtgatgaatggcatgttacatctgtttcttaattaaggggaagtgggccaaagatattctgaaagagtagagttactttttgtcttaggaaacatggctttaagcactagtggacaagtaacgtaccctttgaaaatactttcttgtcaccagtgaaacattttagagctgttatcaaagactgaagcaaacaatttttgattctatagttatatgggttgataatagggagaggaattgaagaatttcaatttagcaccatgtctctgaaacttgaacatacttgaaatgatttttaatgaaggaataaaaacatggattctctgaacttctattttgtatttctctgagagattactgttttcttggctgatgtagttgaattcttaggtgtttgcagtaaagtataagataataaaatggttaacgtttaacaaactcatcattataacactggataatgtatagaatatgtaaaaaatggcatttattaaaaaaatcatgagtgtaacagtctaggttttagctagcaagaagttcaggattttttttaaaatagtgtttggggaaattataaatgtcggttgcataattgtaattcatgaaggaagacattcatacagctattttttacctgttttcaaaactatagaaaaaaaaaggtggtacgagattgtcctaagaattatcctattttagcttgactaccacctattagctacaaggctttgcagtggtgctgttagctaggttcatatgacctatgtccaaatcatgctggcaacatcattgaagaatgattttttcaatgctttcaagttattaacatatttgaatgtacatgtcagtcttacccaaaggaagtgaaaataattcagtatcttcaagaaaatggaaaaactgcattatttaatatactctgctgcattaactatcactttttatagttttgctaatcaaattatgatgaagggttatgagaaatatatcactttttatagttctcttgttagccaaattttaatgaaagattggaagaaaagtctaggattattatgggttttggatgacagaggtgatgtaagtgtaggagaaatgtatgcctagaggacctaaagtcacctagtttttctaatgacgtaaaattacccttggtttttttctgctgagaagaatgggtgtgtgaaatacacgttaatactttggaatttaagtgaagaaagaactccatttaatacactaagcatttgtaccatctagtattatatttttaatctgcatcagacattatgtcatccgaatatcagcccatgagtatagaggtatgctcttcttagtagctatacctgctgccacctgactgtgcacaaggagcaccatgctttggatccttccctatgggaatcgctgggatgtgttgtagatacctgtctatatatttttcagttgaaattagaaggataatcttacagatatttaaatgtgttaaaccttaaatgtaacaaatattttagattaacatatatagactattaacattgtgtttgattcgctcttattactctaatcttaattctagaactttcaaaggttgaaagtcattaccaagaaaaaaatcatgacatcacaaataatttggggcaggcagttagatatatattttttgagacagaaactcactctgtcgcccaggctggagtgcagtggcatgatctcggctcactgcaacctctgcctcctgggttcaagcgattctcctgcctcagcctcccgggtagctgggattacaggcgcatgctaccatgcccagctcatttttgtacttttagtagacagggtttcaccatgttggccaggctggtcttgaactcctgacctcaagtgatttgcccacctcagcctcccaaagtgctgggattacaggtgtgagccaccatgccaggcctgtattttttaacccagagggatcattgattaattgctaatttattttttactctggctttgattttgaggcttcttaattgaggaagcgggatgtgcttatgcttgattatgttaatataatgacagaaaggacatcctgcagtggaattaaggggaatccctgttagctgaaaagccattttttaaggaagatacaggaaagaacagagataggagttacatagtaaaagtgttaagtattatgaactagtcactgtcttcaacatactttctttaattcttgcaaccttgtaacctttacagatgagaaaataagatttcaaaaaatagttaacattttgtcatataaccttgatcagtcaaccctcatatgtgcttttatataacacagtgaactttggtgtcactccctcaattgcaaataaatagttactagtctgtaggctccttgagagcttgcatgtctgttcacttgcctgtcataaaccttgttcactcacagggtgtagtagaaactcaattattatttatgtatttattaaataaataaatgaatacgtgagtgagttgctcaagattacaggggcactgaaataagactggcatttgagtctgtgttctttcccccactctgttttctacccttgtctggtttttaggggttatggagtgtggggagaggcctttttgtgcgtttgtttttgagtaaccagttcttttcattttgtctctattctccagtgagcaaatgaaaattcagggtttggagcaaacttttaacgttctgattatcagtcagcaaatatgagtactggataagtgtttagcattgtggtaagccccatggaattataaattatgtgcctgtttccttgccgaggttctcaaagttcatttatgccaacatagctcttccatacacacataaatacgtattcctgaacatcgtcataaactagggtcattattctacacagttgtgtttttgtcactgcttttcagtgatgtgtgcacgattacatgaagacagctgtgaattaatatttggggagtacgaacactgcagctatccacggtgccgttaggttgaataggacgtcgcaacctaccaactacaaatgatggaacctcctgttagtcttgtatcttaacattcccaggatgaaacaccttttataacgtaatgagctatgtgctgttgttctcttacattttggaaatcctaatatataacattaggctgtgatcttttgctcgatgaggaagtaaggcagactgtatgtggatccttcagcataattcttactttgcttgtggttgtagattatgggactctggttcagttctttagttttgtgtttttcattttaatttcacagaaggcaggtaaaatactctctttcagtgttgcctgactgagtttttaaaataaatcttgaatttttcaggtatttattttccctaactaatgtagaaaaatacacatgtggaatgcacgagaaagcaccatatggcttaggagcttagtaatcatgtaatcagtatattttatgttacttgctattttcagtttataatctaggaatattaagagacaataataaatgtcttttaagtgcttactatatgcaaaacattttggtagatattttagggaagtggtttcttatatagaaggacagtttagcatttgtttaataaatgcataattacagaaaccatggattccatagttccttttaaatgagtttgtagtatgttaattatgatagtatgcatatatgttgagaaactagtatatttgtatttgacatgatttcatttgtagaattcagagctactttgtttatacatatgtgagacaaatacagaaattaatattttaaaaactgatgaaaatatcataaaagatgtgcaagttcaaatctgggcagggcagaagagaaatagaaagctactggttgtgtaccaaacttttctttttagatgccttgtgaataatacaaaaaattaaaaggagcagtctttgctttctagagcttaccattatgtacactggaatattaaagtatgatcttaagtatcattttagagccataagattcgatggaagcaaagtggggcttagggagaatgaatttggatagagtagggtagtggaaaacagttaaggagtaggtagtatttgaactcattcttcaatttcattaagtttttataaattccctttactattcgttgtccattttgtgtactgcttgtgacatactaatagtcacggtttatcccactttccaggaaactgtaccggtcgtcctttacgtatcatttctaatccaaatgcttcatggagggcagggttagtgttttgatcagctgagctgtcttccagtctgaaacccaaagattacagttgtgtctttattaagctttttcttaaaaaatgtatttaaaaataattttattttcatgtaatggttaatatattttattaactaagttggttaaaaaataaattatcttaagctactctttttattctgaaaatacatttccaattttatttttctaaattataaccgctagtcatgtcattttatttgttgttcagtcatcccttcccagtatttctgtttaattttcttttttttattttttgagatggagtttcgtttcgctcttgttgcccaggctggagtgcagtggcgtgatcttggctcaccgcaacctccacctccgaggttcaagcgattctcctgcctcagcctccctagtagctaggattacagacatgtgccaccatgcccggctaattttgtattttagtagagacggggtttctccatgttggtcaggctggtcttgaactcccgacctcaggtgatctacctgccccggcctcccaaagtgctggaattacaggcatgaaccaccacgcccggccttctgtttattttctacgatcatctattctagattctagcctgtccataccatatttacattatggtaatattaatttcagagctcttaaatgacgggtactcgtccatgtgctatccgaacactaacatttaaaactcattgtagctctgagatgtaagtactatctttatgtctcttttgtagatgaggaaactgaagcatagataaattcaagcattttgcctaacactaaacagctattaagtggttagtaagtgtggtatcataaattccttagagtatcagaaaatgaatattaaacattcgcattttaaaaatcttattaacaattgttttgttttgaatctctgggatttatacctaaataaaattccctctgaagaatggagcatttgcacagtgaaccatgtgctgccactctcaacatcagtacatgaacctgttactgacctttgcttgagacaggctatatctggatttttcaaaacatcttgtttccttttttttttttttcctgttctctctctctctctcccctctctcctcttttctctctctcctctctctctcttctttcttctttccctcccttcctttcctttctttcttgacggagtcttgttcttgtcacccaggctggagtgcagtggcacagtcttgcctcactgcagcctctgcctcccgaattcaagcagttctcctgcctcagcctcctgagtacctgggattacaggcgcctgccaccacacctggctaatttttgtatttttagtagagatggggttttgccgtgtcggccaggctggtctcaaacttctgacctcgtgatcctcccccctccccgcctcggccacccaaagtgctgagattacaggcgtgagccaccacgcccggccatcttgtttctttttattgttttcaatgaaataattgtaatcttgattatgttgacttttaagtattgtatttagcctttcttcttaataggtagttgtcaggtcgtcaaaggcagacgagtgtcatctgaagtcggtttaactgagtacattgagtcaggtttctgcccattagtttatctcatttttaaatgagaaataggtgattataataatgcctacctctaagcttattaaaaggattaagttattttatgaatatcaagtactgagtgtaaagccctatatgttttttgtttgtttgttttagttgatattgaccacactaactttatttttgtatctcatgctgtgctctaaggagcacttattagaaagtctgtgctgaaagatatggagatgagtctgattccatacttcttgaaactttttaggaatcatacataccagactgattatgtcaaaagaaaaaatagtagaatgggagtattcagggaacatcctgtctggtaggacctggaaggggtatatttgattgaaagatgattattgaaactgggattttgatgatttaggaaggaaaatgggtataaggtagaaatgtcttttatttatgtattttcccctggtatactatcagtaaatattcaattgagtattttaaaacatcacattctaaaacaattatttcatttttctgtgccttgaattgtgtatcttagatgatggtgagaataacacctaatgtacaaaatctcacatatgaattagtgaaaggattcttttaatgctgtgaggaaatattttgtgcttcagtgggcagtaacgaattttatgtgggtgcttgttagcaacaggagctcagcccaaagtttccagtttaaaaggatttcccaacaatcatttatttctatcaccactatttttgttaaatatttgccagctttaaagttgttgggaaataacaaatcacttgatgatttttgtctttttatgggaaactttttgtacatatttaattcactcttctcagccttaactatgtttcatcaagatcatattcagcttttcaactgatcttgttcagaattgtttctgcatgctaaaagcagctcatatctagagaaatctcactcattttggtcatcgtggggccagaatagtattttggctagtattggggttatataaatttagtttagacataaagtaattaacaattaaattagtggaattaatgtatgaaaattggaagacatacctggcagtcaataagtactgtgtctgtaggagatagatgttacagtcctgttgtttttaacttggaaattatttggcaaaaaacaataaaagttatttgaatttaggaacttgttcctttgtgcctaatttaataagtatttgttgaatgcctgctgaatgacttcctagatgatgatttcaacggactgaatataaaattatcctagtcttcatactttattagaaaataatttgctttgaaagtgtagtttttgttggactcacattcaagtttttaaaagttttttgagggctgcttttataactgagtcagtgaggaattaaattgtgtgaaatctactttatgcccagtttctcaatgaacatttcttaaactaatctaagattatatgcacaactggagatggtaatatgtctaagctttaatatttgtcttaaaatgtatatattcacaatacgcctgttattggaaccttggtttttgtcagcatgtaacacttttgaattctgtttggaggggttttggcgtatgaactttcacattaagagcacagtaggagcagaagtcttgtgctcatttgcttgactacaaatgcataattaagagagtctgtcagcaggggtgggacaatcagtatactctaatgcttcatgttatagaatccctttgttgttcaaacagatattgtaattagagcatacttttaaacttcatagggcagcgattcataaagtttttcaaaaatccaaaacaaatactttgtttctcaaatgttgagattatttttttactttgtagttttacatcactgtatacagtggtttcaaaaatgaaatggaagttgttttattgaaaagtggtaaaatttagttataaacaatggtgttaattagtcctagcttagtaataatgttggaaatacgcattgtatattaagatctaattttagttttaacaacctcacctattcgaaactttaaagactagaggaattttatgtaagtgaaatagctacagatttatcctttttgtatatatgtatcattgtaatttgataggtgagtctctcatttagggagaaagcatttttctccctaggtgcaagagatctgttataccagatgtttttctcccagttcttgacattattctggatgtgacttactcagaaattcatttatggagaaagaatacttgacatgaagttaggagataggacaaatatagaaagacaaaaccaaatctactaaataatctcatctacccctttatctgccttcaaagtccccgccagctctaaattctgtgaggacaagatgtgcttagaattctacacaaaaatatttaaaggtaaaaaggtaaagtaaaaaattctagagattccactattctgtgttccgtttctggtttttcactattttatgatgctgttttaggtcaatttctcatgtaggtgatatgttgtgctaggaattagttgttgagggtgcatgctgtaaagttgctctggctaggtatggtagcttggtggtacaacacttactgcctgacttgactaaatcatgttaaatgttggtaagactgatagtcccaggttcatgtaacttatgaggattgaatgaggtgatgtatttatattgcttagcattgtccttggcaagcagtgtttgataaaagcttagttgccatcatcattttcatttttaagtttgcttatcatcacctaagtctaatttatctcaccatagtatacttgtcaagaatacagaccatgataatcattaataattgtgactatctgctctgccatcaagtgtgaatgaattataaagttgcttagcaagctactatatttgaatttgctgtataaatagagctattttccatttccatggaacctctgttgttattgcaccctaccttaaaagatggaaggttagtggttttgagctctgaacatatttatacatatagtatttatatgtaatttgcctgtgctgtcactttgctgttatattgagatagaactttagtcttgcagttttaaaaaatacttttgacccatcttgtctcctgttcttctgatacatcaaaacaaggtagcattgaggttttagagtaaaagataagcagactgatgggttgtgaaaaccagacctcataagagttattgtagaaaatctgggagaattgactagaagtaagagaacaagaaatggagtaaaaattgtcatgtacacctggtaactaaggagaaagaaagaagccgtcccagaaaccaagatacaggagcaaaggtgaatatatgagggattaactaaacaggcacagtaatcattagtacagcagagcactgtgggaaagctgcagcatattcatgcacagtttgatatttgatttgaatgatgctcttcaatcataaaagttcaattattcaattcagtaaatacttgtttagagccagatatgtgtaaaatcaatgtgtacatactgtcaagagtatgaaaatcagtgagatgattctgatattcaacttggagcaaactttctaatagctagaaaaagacaatgcacagataactaagttactatataatacagaaaaaaaagaaataaaagtaaatattaaagaaagggaaaggaggcattctagacataggcgatagatagcttccataaacttatgggtgtcaaaatccatgtttggggaatggccagtaatacagcatggagtaaatctgagcctatcgtgggaagtgaatgaacacggcacttcagattagtgtggatagatgtgaatgggtgcatgtgcagcagccagtctctgtcaaagcacaagtaagccatgactgtgtttcagagatttcctacaaagcctcaaattctaaaaatccacgctgattcagaaaattcattcaggatgagtaatagctgagacattaattgtggacagatttgcagcagggaggtatgaaccccagtttggacatgtggagttcagactgctttagagattgaagtatacatttctagttggcagttgaatttggaggtctagaaatcagggggcagtactgtgctggaaaatgtaaatttgggattatattgatgcaaaactgtgttcttctatgttgctgaagatttagtagcacatatattatgaaatgatattgcaaatggtaactgtaaaacagacattatagtagtcatgagctatttttttccacatcagtatctcagctattaacccctgaaagattgtttgaaacataattgtaaaaagaaacgaatgcctcgtagaacacagtttctaataaatacagcatttttggtgtgcgtccatatcatcatccctcctgtctgcttatttcaaccttttctttgtcctgatgtatttaagtgagaaaatgggttttgtgagtggattcttactatggatattttaagttcagaagtaaccatcctataattgcatctatccttaatgactaaaagaggaccttttggggtgtgttttattgatttctctataaaatttgccaatcccagattgcctttataatctgcttaagaaacagaatgagatcacagggagaaatagtatttgtattaaataattactaagctgcaaactcactgaaggaatttaactcttcttgagctggaatggactacagtagaatgaatatggcttcatggcttctgcgtagcatgacctcaaagcctttttttgtgtgacatttgatatgcacatggatgaaagattttctgaggcctgatgtggaaaacgggttggtcggtctctctcttcacactgcaccccctccaaaacactaaaagaggtgcttttagtgtttactttcaattgctacattgtttgattttgaagtgtccgcttcatttattccttgtggtgaaaactcagtgggtccttttcatctggaacctcagatccctcagttttgcgaaaaatatataacattgatgatttttctccctctgctttctttttctttatattggtagttggacatcgtcatttcagtttctgaacctcttggactagtcctctaatattatacagttctgcaccatttttttttatctctgtcttttgctacttggagagttcctcagtttgtcttccaaccttctatcaaatttttcatctttgctctcatgtttttagttgcaggagtttctatttgtattcaaaatttttaaatagagcattcttgtttcagcattgtagcgtcttttattaactctctgaagggtcagttgttcaagtctcctgtccccaagatgtgggcctgggttcccttgctctgcatttggagcaggggagatggccggccagcccagctgtcagagtggaagttaccctgtcaactgttctcctaatgcagtttgagcaagtgttttacttcctttcagaatcagtttctggtctactgctgggaattagggagtgcttgatagctagccatttgtggacaggggatatgggaattgaactgctttttaatgagagttcatctagtcctgcaatctcagccccaccctcacccctgttttcactgctgcccatttcctcagtatttttggggtggattgcaaggaaataagtttctttcttaactagagtcaggtaaattttaagttaaccatctgctttctagattcttaatttttaaatggtttcctttcccattttcttacttcttacgagtttggacattttatttatttatttataatagacacagggtctgactgttccccaggctggccttgaactcctgggctcaagcagtcttcctgcctcggcccccccaaagtgctgggattacaggcatgagccactgtgcccggctgagtttgtacattttaaactctgcagtgttgtagaagaatttttggtgggagtgtaagtacaccattccattaatttctccatctttgaaaatttttgctccttcaattgtttttaaaagtgtaagcaaaaatgttgattttgaagcaaacagggtagatgtagctttctcctatttttatatttttaactatcatttaagttgttgaattagtaagagtacgcattggccaagtgttttacaccttaaaaatgtattcttgcaataaagcaaaatggcaaataatactgcaactttgtttctatcatgaaaataattattccttttaaattctctggcttttctccatgtatagaggtttctgcggcaagtcaaattttagtttttattcttaagcttttctcaaaaatatttgattataaatgttcctcagttttcattgtattagtatctatatgcattagtgtttgacacacacacatagagcttttaatgtctttgtctatttataataacatctgtatcacttctagattggtttgagtgaattgattgggggggaggtggtctcatgtattgcatttttcttgctgctttgcatgcccgttaatttctaattgtatgccagacttttaccttgttgggtggatatttttatattcctataaatatctttgagctttgtcctgggacacagttaagttagttggaaataatttaaggcatttggtcttacttttaaaatgtatttagttgtactggaacaatgcttagattaggtttagttttttcctaccactgaggcaagacctttctgtgtcccttacccgtggggaatccttcaagtctttcagtcttgttcttttctagagccaggcactttgacctggaatccttttgggtggttccttccctggcctctggaattttctctcaagtatgcaacgatcagggttcagctgaatatttgagtggcagctctcccaggactctctgagctttggctgcctcggtttccctggactcttgcttagtctcctcatggagttgtctggagactctcaagccagtgagtgggggcagttataggctcacctcagttgttcccaactctgtgtcatttgtccttagttgtctgatgtccagtggcttgaaacttgttgatacgttttgccagttttttggttgtttcagcaggaaggtgaatctggttcctgttactatatcttgcctggaaacagaagtccctcatatatatgcgtttagtcaaataggtgcacttttaggcccaccaaataataccagactagtagcttttgtaggtctctctccaaaaaaaaaaagataaataaaaaatacaaattttggtgagaaaatactgttagcattcttgaacataacaattgaaatctggataacaaaactaatttttcttgccacagttagagatattaatacatattttatttcttgccatacagataaccctgaggtttccagtttcttgattcattgactccttggtttcccacttagtttgcatggtgtaccctagtcaaaaagaaatatttcagagttctgtttattaaatatttactctacaaacaactttgaaacagactatacattttatttgtaaataaccacatttttactaatagcatttgtattttcttgggtgctgttcaaattctcaaactttggaatcagatttttgtactgccaccctcttttcttgttccacattgatttttgtatgttcttgatttttattacagcaaccgctaacaacctagctttgtaaagatatgacatcatcaaaaagaatgtaatgtgaccttatgttgaaacagtcagatattctgagctggtggttcacacagtgtcggacagatggtacccctgtaaaatgctgtgctgactcagagttcactctttggaaatacatagatggcccagcataggattgtgtctgattttttttttccctgtatccccttacaatatgtggatgcattttcatcctaaagatgtgttgattaaaaataaagcagaagcatttactgttaaaatttatttttagccttattggctaagctcaatcatgtgaattgttgcagaaagcagttttattatgcctgctttattttcttttactggaatctaacaattaggtaaatagtaacttctaaaataaaggtccaaaaacagcagatatttattgtttgtctgtggtaccttgctgtgtgccaggtgcatttatatttaccatttatatactacttatatattcttattttatttaaaaacactttctctaaaacttaaaacagcgattctgaaattatgccaactctacttaacctccctgtagcttaaccaggttttcaacatggggatatttcttactagaagacattaaggaaatgaaatatagatattctctatgaaactagtatttatgacttgatataattaaagagtagccttacagttaattttaaggtatggtctgatgggaatgtagataaaactattttcataattaccgcatgaaatacttaaaacaagtggtagtcatcttacacaataacatctatatgcaaaataccttttctaatgctgaatacaaccaatgtcattaaaagcagttgtaatgaagtggaaagatcactgaattagagaatgaaaactttgattcagttcctaaattgacagcctgttagctgtgtgacattgagaggtgacccccttaaccttgatgaccttctgtttacttataagtaaaatgcagaaataatgacatgtttctcaaagtgtttttcatggtaatgtaaggacagtatcagatgtatgttgtatgatactacatacatgatgatgatgtatgcttctagtgcataggagcacgcttggggctgatctttagcatctggttctgtgcctggtagatagtaagtgctcagtaaatacttgttggattaattatcatttgacccagtagtctcacattcaatcaaactttgaggacccagaaaaataattcaaagacttgtgccatcatagcaaaataatgcaaacatagctgaaataattgacaacaggttagtattatgaaagatgtgctctctctttaaagagaataattttaatcatgtactctgtaaattttttaggaggagcaaaatagaggcaagcccaattgggagcatctaaatgaagatttacatgtactaatcactgtggaagatgctcagaacagagcagaaatcaaattgaagagagcagttgaagaagtgaagaaattattggtacctgcagtaagtaataatttccagaccttagatttgggcctcgtccttttttgtcagtttattttaaattatcgtaatgtttataaggaataggttattggttgttagaaattttatttaagcataaaattaaaaacacctgactgatacttctaacataataaaaacataaagttcgtatttaggggtccttagatagacattaaaaggggttttggagggtgacgtcgcgtaagaaattatccagatgcttttgtgttatcagttctccttccttcccggtttctctttccccatctcttcccccatctcttccctctgccccccttccttgggttggctccttattgtttcttaaccctttaatatttttagaaataataattgtactactcccagagtataatttttttttttttaacgggaaatgaaaaataaattactggttttctgggccattaatttttttttcttatattagtaaaactatatggaaatgtggaccctaatttgctattggaaaaactagggctgggtgcggtggctcatgcctgtaatcccagcactttgggaggctgaggcggttggatcacctgaggtcaggagtttgagcccagcctggccaacatggtgaaaccccatctctactaaaaatacaaaaaataagtcgggcgtgatggcaggcacctgtaatcccagctacttgggaggctgaggcatgagaatcgcctgagcctgggaggcagaggttgcagtgagctgagattgcgccactatactccagcctgggtgacagagtgagaccctgtctcaaaaaagaaaagaaaaaactaggaatactgttagtattgtgtccaacaaaaagcattggcatttacataaatgagttatggttcctgctgctttttatttcccagatagcctattctttattaccctgatagtttattcaacaagtaaactcacaaatcataaacatttcccattaacttgatgaaattaattccttggaataaaagagttttatgtaaattctgttggtagattttattttttttaatgatcaggttaaatataaactaaaatctatatttgtgtactattaaaccatggaatctttctcattttccttaattgtgtggtattgaaaaactgtatagaaaaggagattttcgaaagtatactgggcaattagtgtcatgatcagaaaaagttatttaacatcgacttttactgctttaataacattttcttttctgtagcttactttattgtaagaatacggtatataacatataaaacatacaaaatatatgttgatcaactgtcaggcttccagacgacagtgggctattcgtcacattttgggagagttgaaagttacacaaggatctttgatgcagtctgtgtccctgacaaccgagccctcccttgttgtttgaggatcaactggatattgttagcgtcttttaaattttctatttacccagtcacctgtaatctcttgtcttgcttaccatttttatttctagtgtttagcatagagcccagcacatagcaataacatagtaaattgaaaaataaatgattgaatcttgtcataaggtaaaatcagttccttcatcttcactatagaaatgcataaaataactgaattttcctgaagcatcaaatgatttgggtttttacttaaataaatgtgggagacagaatacatcatatttttgagaactcacttcctggtttttgaatcccagctttgtgacttttaactgtcttcattttctcatctatgagattggaacatggccaagcatggtgactcatgcctataatcccaacactttgggatgctgtggtgggaggatcatttgaggtcaggagttcgagaccagcctgggcaacatagcaagacccctttatacaaaaaatttaaaaagtagctgggcctggtggcacatgcctatagtcccagctacttgggaggctaatgtggaaggatcgctgaggccaagaagttgagctatatgatagcaccactgtacgccagcctgggtgacagaataagaccctgtcccttaggggggaaaagaaagtttggagcattataaacccctatacttcttgtgaagattaaatgagatgatacatggagaatacttagcataatacctagcacatacatgctctgtaaaagtttgttgtttctatacaaatgctgatgataaaatgaatgcattaattcaagttggaaaaaatgtacagaaatagttccttgccaactcactgttactgttttcagagaagttgctttgacttctatgaaaatgcaacataaggctcattagtttatcattgcctaaatattttcaaaggcagatattttatcttgaaatgtacctttaatagtgaggttcataattttgtattgttgacagtttgaatagcagatgcccagttaccctgtagattaacagaaattgccagtcttttggtttggaattctcagttacgcttttcttgttcgttcagtattctgttgggtagtttagactttttaacttgttaccatggtcctgaaaaacaccaagttcagtcaggttacttcctgtctctctcagatttgcttaccttccttcatccccattgcctttacctacttcaaaccatgcttgtatcagaaccccacaactggtattccttcttctggggcctctcaaacccatctttactttgcagtctattgttacctttccctgcttaaagattttttagtggtgccttcttactctgagaaaagaatacaaaactccttagcatggcctacaaatttcttcatgatttgccatagcttacctttcaggtttcatttttttactttttgctatacctaaagcacacagtcatatgtacacatcttcctcatcctgccacagattgagttgttctgtatttatttgaatttcttaaagcttcagtcttctcacctctgggccttgtagttcattcaacaaatgttaattgaatgcctgctgtaggttagacactgtgacagctgtggaggatacaccaataataaataaaagctgaccagcaaagtgcctgccatcctgaagtttaccttctgattggggttggattactgacaatgaggaaaacaaatataggcaatattctcttttaacaaagtgctgcgaagaaaaataaagcagaataagggaatagagaactgggattagggaactgctattttatatgggctggtaagagaaggtgacatctaagaaaaaaccttagcgaaaagtgcggtggccctgaggcatgttcagagagtatccaggggtccagtgaggagcttaatgagccggctgaagagcagtaggaggtgaggtcggtggggatgggaggcactggcagatccaaggcctgtaggcatgggaaggagattgggttttagtccgagatgagaagctatttattggaggaatttgaggaaaggagggacaaagtgtaatttgtatttcaaaggatcattccagctgctggcctgagaatagactttgagggcagtggggaaagcagagattccaataaggaagtctttgcagttcaagttagagattaaagtgatttggagtagtgttgaaggtgctgagaagtagtaagatcatggatttttttgaaggtaaaactgctaggaattttgacagacttggtgtgatatgatatgtgataacttcaagcaattggagttgtcatttatttacacttttacaagagcaggtttgggaggaaagtcaaaaaattggatttgaaagtataaaagttgatagcaaatgttgaatgggcatttggttataacaggaattaggtgagaaagtggaacctagaattatgtagaattaagaattgtcattagatcaaaagctttttgagccatgagactggatgtatcatcaagaaattggatataagtatagaagaaaaattgaggactaaacctggggtgcttcaccatgtaacaggaagagagggaggatccagcaagggagagcaaagcggggagcccctggatttggaggagagctgtgagccagtcctggaagtcatgcttagaccttttaggtaggaagaggaaatcatcagccattggatttggcaagtagtggtcattggtgaccttgccagtcaatttgttttttttggaacagtggggttaaaagtgtcactggcatgggttcaagaaagaatggcacaagaggaaaaagaaccgggattttttccctcttcaagattttattatgtttataaataatccttcctgtactttggcctctcggttcttttatattgcttcacctgcagtgatcgtgtcttccactccacctcagtcatccagcctcatggtagttccttagacctttccattacccctaaaggtgccttcctaaataggcagcggcagaatgtccagtagtgaacatttcccttctcttcagtggaagagatgctgcatgaatttggcagagttaattaacttgtgcatatatacttgaagggtaagtctcttgaagtagaattactaggttaaagggtaagtgcattttaaattttattattttattcatgttaaaatttctaagttgccttccagaaaatttgtaccaatttactgtcctgccagtattgcaggaaaatgcctatttctcaacacacactcaaaccctggatattatcaaactttgatctttgctttttctaataggcttttttttaaaagccctttaatttcaaaaatgtgagtaaaatctcttggttcttataactatttgttatttaggtcagtttttatattaaggagctttgtgatacttacgtaacatgagatacttttgtaatgtaagaactttaatgttcacatcttgaactgttttttttttaaatgggaaatattccatttacattatcatataaagaatgaataagttctttttttttggaaagatagagtaagttcttttttagaaagacaaagagttttgtgtattttaatcattttgtgcccattttgttaggtgttgtatagcaaaaaacatctagtccaggcttgagggtcctagcagggtggggagtagggaggggcagactttttgcttaatataaactttcataaggaaatgtaataagtattttgtgtttttccatctgcagaaaagactaataaatctgattaaagattgtacttccttctctttgtgatgcagttctaatttttaaaataattttgaagattgtaatatttcatcagtttgcataactttacatgtaactaaatgtttagtaaatcagttcaaatcttttcaattcgtatttgggtttcaaaacaatctggtagacttctttgttttttaccaacaagcgtgcaaactcagagaagcttgagcattataagggcaattatacttgtttcttttcagagaacagttcagtattgtaattatactgcaaaagtaataagggttttgagataatcacacaccatttattagtagaatcaaataatattttacctggagaacatgtttactctgaaaatgacaccagtttagtttcagatgtttctttgattttgatgatcagtttactttattcctttttgtttcctggtgacaaaacatgaaataactaggcaggagttgtttctcaagttatatgtaggtttttatctagtctaaattggttgacttcaaatatctactttttttttcttcctgatccaatctagttctagagttttatcaattttatcaaccgttttctaagtatcagcttttggttttgttgatttttctcaattttttttctgttttattgatatctgcttttacatctttattctactaaggtttagttttacttggggacattttaaaggtagatcagtgatttgagacctgtcttttgtacttctgagacttttcttttaaggacatacattcctctctgagtaatgttttagctgtatccaacaaataatattatgctgcgtttttattatcattcagtgcaaaagttttttccaattttctttgtaatttcttctttgagccgtgttttatttccaaatgtttccaaatatttgagacttttctgtttatcatactgtagatttctaatttgttatgctcagtatgtatttgataagatggtagtcttttttaatctaataactttttgctagcccagcatatggtctgttttgatgaatgtttcacatacacttaaaagaatgtgaattctgcagtagttgcgtgtatattctgtattgtttatagatgaagatagttgaaagcactcagatcttctcctatgtctaccctttttttttttttccttttctctagttttgtctgttactgaaagaggtgtgtaaaaatctccattcattcattgtaaagatatacacaccagtgtgttcttgatggcactgaaagggcaaaagaatttggtgtacacatgtacatgcatgcatatctatgtatgtaatccgtctattatagcttatacaacctgtatgaacatggtttggcatcattaaaaagttttactctatttcatttcatatgatagtaactttttccttcttttaattttgaggtctttatttttttctccccaaataccagttatttcatgcagcatcttttctataaagatagtaccaagcagtatggcctacttgccttagagagactttgtaaaggtagtaattattttaattatgtggacatgaaaggcgcatacatgttcctccttcctctttttgcattttatgtgtttaactatgtatgggctggttacttgcaactgcatgtcatttgcaagttcaatttgtgatcccaaaaggcaccataccaggagagagtacttctgttccttccctacaaaatgtaccctgtttgctagtcatgattttgtcaatataggtttttatttacaaggaatagtagcccccccaaaaaatgaaattatataacattactaaaaaataatatatataaaactgtctctccacacaggagcacacattatgggaatgcttctcaggtatcagataccatccttcctccttccgttaatcctcattcatctagttggaaagtaatacatgatatttcttagtcaagactttatatggatacatattctatgatcttttgtgatcttctcagaagagacctaaaacacacaagaatggtgaaattggaggaatattatgctggattatgctgatattaagattgagaaagtagagatgagggatcctgtatcttgttttcactataattttcccacagttttaataggaagtggggaggtaaaaggtttccattggggagatagagtactaagcttgaaagggctagactgtaatacagaaattaagtgatttcaggcaactgaagttcattgatgttgtctcataagttaaaacagactttggcacacaatatgcctgcagacctagacatttcataaagtgttgaaataacaggtctttttctttatggtgagtaaaattgtgtgtttgttttctctgtatgtttactttataggtatttgagaacttgaatacagatcagtttttaacatatagctgatctctttatatacatggaggtcagtactataaaagtaaatgatctaatacatgacgacaaatttccacctgcgggttttgaaatttaaagttgtcatcaggattattatgacatttgaaaatattcatcaagacaaaagtaattttaattcattttcaaaaaactacatgttatagaaatttaggataataggcatctgttacaaaatgcactttttaaaagtttgcattttgtgttccccaaaggttcttttctgtctgccatatgcatttgactcataattaactgagtattaattataacctgaaaatgttaagagttaatgaatgagaaggtaacagacatcatgaccatagagatgtggtaattttatctttgatttagttctttaaccaaattgttaatgagttgatggtactgcatttatttagtccttgatcaaatattgatcattgaaatttgtggtattgttggcctccttttcattttattgggagagaaggagaggtattaaaacatatattaaaagacatctagaggtaatgtactggctccttgatagagctgtaatgggaaagaacatctctcatgtaaagaaaggtgttgttactgatttctaccttgcagagccattttaatctgaatgggaaatctgtctggggacccagagtgtggtaattagcagtctcttcagagtgtcagagcagaattaccattgtaatggtttagctgcaggataaaaggattgaatttgggactgcctgtctgccaacctaaatgagttgccatgggaattttcaaatgtgagaggcgtttacttaaagctttttggcgggtttgaataaactcataaattgtaggtttgaaagaaggcagtccttgctttctctcatataggcaaaactgtatagaaggctgatagcttcttaaattcttaatgagaatgagttgatccatgttcccatgcaggccatcagcttattcaggcttgttttttcactaagtatggtacaatgaagcacatttgaggaaagacattttgttccaagtctctagaggaaaaaagtgacaactctagatataaatttcctatcttaatttaaatatattttcagataatgctattatactgattctttgttttgctttaacaaacgttaaccagatactgactttaattttactcagtgcatgtaataaatacatatttttatctttgtcatagtttttctcacaaagtaagaacatttaaagcccttttggaaaataaataagatacttaggtttataaactggattattcaggttgcacgtaactacaacctgcatatacatgggttccgcacccatggattcaaccaatgaggaaattccacagagtttcaaagagagcaaaatttaaatttgcatccttcaagcactacattgaatccacatgaatgaagtgatatgtgggcgttgcattaggtattataaataatctagagatgatttaaagtagactggagcatgtgcgtaggttatatgcaaatactatgccattttatatcatggacttgagcattcatgggttttggtatctgtagattttggtgttctggaaccagttccccgcagataatgagggacaactgtactttcagagagagcttcagctctcccctgtctctcaaaagaattaaattttggtgtaatgactttttagtgagaaaatgttcctgcaaatgtctaaggtgatgaacatcacttacactttgcgtgccctcactcatcctcaagatatcagtaatagtagttcttacattggtggtttgtatctgcccttcagaaaaacacccgaagtacaatttaagccaaaaattttgagactgtaaaatacttttaacaaaataaacatggtctttttggaggtcttaacattgtcaagccattagggtacagtttcattaagcaaataataatttggttgttactaaccctagtggcctgaaaatgtggatgcgtctttcaaaaatgtttcaccagggaaatgtgggtattttgaggagagaacagttgttcaattcaggtgagaaagagtaaaattttttaaggtacaatacattttttgtttatatattaatctttactggtcagtatgtaatcacacatcagtataatctgattaaaatcctatagctctaagataactgttgaaccattaataaaacttgagtcatggacagataatgtcctaaaatctcatttaagtgtagaatacaaagacccatgtagtccttaccagagatctctgtaatttctgcagagctccttggaatcacagccatcacctttgtgtgctgtgtgtaaggtactctcatgggtatgtgctgctttgggaaaaatgatggcggagaaaagcactgcagaaatttaaatgtgctgattttctttcctgtgaagagggacaattctaagtaaaatccagttctatatcagggtcataatttttatattctatctccacattttaggtgtgtggcttattctgcattaggacaacaggcacattgtcctaactagaattttcacaaataattaaaagtaccatttgattcgggtgacattccatacagacagattaagaagtttgccaaggtataggttttaagacttccctcaacatcataccataattatctaaatcattgagcagctatataaatctttgcttaccgtctgtccagccgtaatgttgcctggcagtgactgtggcttcttaaacacaacagagggcttttccttaaacttggatgtttagtttgatcaggctccttggtgataaaaaaatatgtcttgtttctgggaactgaacaagctttcccaaacagagactctgtatgaataacatcctcctcttgattcttgtaaggattcgttgaggaaccgcttctttcaacacaaggttttgttcaggttgacaaaaggtttagacatcttgtaattctaaattttaggcgttgcaaatgtaaaaaaaagggaccctgggcatagaataatagggcctaggatatatttattaaattaaatatttataccctaggaaatatttttgcatttgtaaaggaagtccttttactttaactttgtattccttgcacccctcagaatttgcatatttagtttgtaacactttataattgcttgtacctattaatttaaatattaatgtaaactattttataattggtataaatatataattatatattttatataattatataaaatattaatatttatgtcccataaacttctcattggttgggataatgcattttagtgtttggggttttttaaaaatttctttattaaatgtatgatattctacacagatactgtaaaattaatttcaatacatatttttaaatatttattagaaaaataggcgagtgatttctcagtgtattttctttagttcaattattttcatacatcactttaatttgtttgcatgcccttctgatggtgggtaagtagcatcatgttccttatatataggcaaagtatttgtaatcattcactttatagtagggtgcattgaacttgaattagtaaaaacattaagaaaatcacatgtcccttactatatttaatgtgcctgtgttttaactcatatttaatttttctttaccacatttcagatgtttcagtgttttgatatttttaagtaaaattattaggagtaaccattgtgacattttaatagtatattaaatgattcagaaatcacatgtcccttactatatttactttgcttgtattttaactcatatttaatttttctttactacatttcaaatgttttagtgttttgatatttataagtaaaattaagatagtaaccattgtgacattttaatagtatattaaaagattcaaataagcattttagtattaagattatttcaggtaagcttttggtagctcattatagctttatttttggttgtatttttaataactattttggaaaatttgaaagtgactattaaattatcctgcttattcatcacaaggctcctttatgggaattaactctgaaaccatattgccaaattatataaataagtagatgtgttttgttttttaattctcttaacgtttaaaacctttgtggagaaaaacttaatctttaatgtataaataaaatataagagtatttatcaaagtatctttagttatgccttcaaactgacatggcctcagcttatttttagtaaccttctttgtagaatataatatttctgagaaagttagctaatttaggaattagcttactttgtgacagtaatttatgaattctcctgtcaatttaaataaaaatactttgattttttaatttagcatttgtggaattatacttgggaatatttctttcaagcgttgaacgactgacaaaagaaattcatctcacaaacttctattgaaaaactgcagtttacaaggctagaaaacaagacttcattatatacagagacttagatttcataatgtaaatgagaatagaacaaaattactgtgttcttaattgcttttttgatcacttgatgtctgctcttcagaactgtcatgctctcactagaattaaagtatttcatttccaatttgttcttcctggacagtctgttctgtaaccatgcctccagttaccactgcagtgctgattgtttttcagcgtgcttctaatctggaattccaaatcaaccagccattcaacacctccatgcgggtgccacataggcatctcatacataacattttgaaaactaaaatcacattcttccttgccctccccgtatcacaattcttcccttgttttctctgtagaatgatacttgttgcctaggactcatccaccttccttccacctttttctctcctgccctggctccttcccatctatatcatcaccaagttctgtctgattctacctccaaatagcacatatcttttctccatctccacagatggagtaggtctgttacccatggtgctccctcctatccattttctacttgaggccaaaactatctttttaatatatagaaatgtcatcacactccttgttgtaggttttcagtgactttctatcaccccatggtaaaaatgtatggcattcatagcttatcttcatctaacatgtgcctacttttccaactttgtttcatgtcattcctcctttacacttacacccacacatattaaataactcacagttttcagaacactgtttgtttacgtagtgtattttggcgatctccagaaagaactccgtgatttgtattctgtactaatattatagtagaatgcattgtctatgatagtggtgtagaattattagaactgaatgtttgtttgtttgtttatccccttgcccctgactgggcatttcagtgacatgcatgaagtctgtttcatcttagtatctctccctcactgccttgcacatacatagaaagtgatcagtgtttgttgaattaatgattgaatattagtcctttaacaaagcacttgttgtttgcttttcatagtaaaaatggaacctaaaaacacattcatgtaaaatcttccacaagtcacttacccctttttgcctcattttttaaatcacctcattaggttgctctgttctaaatcaattaatatctatatatgtgtgatggtcatacacatacgtaagcctacccaaaactattaaattttacactttaaacaggtaaatattgtggtatataaattatggcagtaaaactgttttttaaaagattgtaatagaacatggtcagtttggtaaggaactgaaagaaggtatgtgtgaccagagtgcagagtgagagagattgaggtgaggtacccagtgagtagacctagcatgtttgaggatattgatcttatctgaagaggactgggcactactgaagagttttaagaagtgagccaggtttattttcattttgtcaatatcactctggctacgaggtgagagaacatcttaatgggccagagtggatgtgtgaaaggagacccggaaggtgacagttgagttagaactgggcaaaataagcagttatttaagtggtaatatagactggatgtggtgaatggtgattgactagaaggtatcgtttgtaactccagaattctgacttgtataactggatggatagtgctgtattcactgtaattatagaatatggttgctgactgggtaatttataaagaaaagaggtttaattgactcatagttccacatggctggggaggccttaggcaacttacaatcatggcggaaggcatctcttcacagggcggcaggaaagagaatgagtgccgagcgaagaagatttgaccagagaaatgtgggaggagaggccagagaggttgaggggggggacatgaggttggtgatgatgaaatttgagcagagccaatgtctcattttccttagcagtcctggaggggatatgcaggaagtatggacaggaaagggtaggaaaaggcttgtgaacatcccagagaaagtgttctcctgcactccagtgctgtgaataacttaagactcagtaaaagaccaacagctagaaaacttacttcctgaaaacactgcgctgggcatggtggctcatgcctgtaatcctagcactttgggaggctgaggcgggcggatctcttgaggccaggagtttgataccagcctgggcaacatagtgaatccccatctttacgaaaaatacaaaaaattagttgggcatggtgacgcacacatgtaatctcagctactccgaaagctgaggcacaagaatcatttgaacccaggaggtggaggttgcagtgagccgagatcgtgccactgcactccagcctgggtgacacagtgagaacttgtttcaaaaaaacaaacaaaacaaaaacatactacatggtgttctttacttgtctgtggtttttaaatgaacatatattagtatgcaattgtagtaatgtttcactttgttattctctacctcttaaagaaaaaattaccttcttttacaatctaacacactacttttttaacaggtgttttaagcatctgtttgtatttgttgaacaaatatttcttaacattgtatataccaggaacctaattgtatacttttcagagttaaactatgcaatctgttcttcagtaaatgaagctttgaccgtgcagtcaaatccattaaaagttcttccatgggaaattaggagagtttcaaactcacagtgtcttagtttgatttctgttccttataacaatacctgaaactgggtaattaataaagaaaaggaatttatttctttgttatggaggctgggaagtctaaggtcaaagggtggcatctgtgagagccttcttgctggtggggactctgcagtgtcctggggcagcgcaggcactacatggtaagggggtaagtgagctagtgtgttcgcccaggtctgtcttcctcatcttatgaagccaccagttctcttcctgtaataatccattaatccactaatccattgagggactgatggcagagctctcatgatccacgttgaggattaagtttcaacatgagttttggaggggacatttaaaccatagcacatagtaacaaagctactttttcttacaggaatttcagtaatcagagatttggggggaagctatgtggctattattataaaactgagttctaacagggcaaatccagagttgaattacttctaactctggtaccacagcagttgcctttttttcaccactaacaaactttcttaaatatacgtacgaaatatttaaagcaccagccaccccaacaaagagctgcttatggctgggcgtggtggctgacgcctgtaatcccaacagtttgggaggctgaggcaggtggatcacctggtcaggagatcgagaccatcctggctaacacagtgaaaccccatctctactaaaaatacaaaaaattagccgggcatggtggtgggcgcctgtagtcccagctactcagagaggctgaggcaggagaatggcgtgaacccaggaggcggagcttgcagtgagccaagatcgtgtcactgcacttctgcctgggcgacagagcaagactctgtctcacaaaaaaaaaaaaaagctgcttctgttggaggacaggggcatcgatcaaattttaaccaataatggccagccaatgtgaatgttatctaattcattgattcctgattccatttcttatgaaaactagtatgttagaaaaataccagtgcttgcatatctgtgtgcataaggatataggaaaacacaaaatcagtttctcctactatactctcacaacaccgagtgcttctgtgatctatggtcatcaaaatttgtagggattcctcctcaccaccagcagccagtcagttctgacaccagattcctcagcagacaccagctgggtgtcctccgatttaatcctgttctgacgctgtccacctggagatagccttaggtcccacaggttgagggctccagttccacaagatgtctcccacttcaggcaccagtcacaagtagtaggtggtagcccatacttcttccttaccttactttattctagcttagcctaactctgaggttcaagattttagtcagtaatttgtgttgaagatatcattagacatctgatgaaacaacaaagaaaaagaagatgggcagcaaccaaaattaattacctcctctggtgttaccaccatgactacatctgaaaatagtttgggtataagtgaaagtagcagtcatgacataaaattgttttaaatgccaggtagttttctaccgctactcttctttgaggttgtcaaggttgtgcttgatagcttagaaatctcatgaatatctcctggtgaaaagcatttactttgaggagtcagagtcactttgaaaagtacttcattactgtgatgaatacattacacagcattaccttggaagtcttgtaagagcagttggagtgaattaacaatttaatcacatatcttcatgggtaagtttaatactcacagttaactccctaaaattgtatgcaacattttttgcttacacagttgacttttgaccatagtagggattaggggaaccacccccacgtgcagttgaaaatccacgtataattttgactccccaaaaatgcagctcctaataacctgctgttgacaggaagcattactggtaacagttgatcaacacatattttgtatgttatgtatattatatactgtattcttacaataaaataagctacagaaaagaaaatgttattaagaaaatcagaaggaagataaaatatatttgctattgaagcagaagtggatcatcataaagttcgttcgttcttttttttttttttttttttttgacagagactagctctgttgcctaggccggagtgcagtgacaagatttcagctcactgcaagctccacctcccgggttcatgccattctcctgcctcagcctcccaagtagctgggactacaggtgcccgccaccacgcctggctaattttttgtattttttgactagagacagggtttcaccgtgttagccaggatggtctcgatctcctgacctcatgatctacctacctcggcctcccgaagtgctgggattacaggcgtgagccaccgtgcccagcctcataaagttctttatcctaatcatcttcatactgagtaagcggaggaggaggaggggttggtcttgctgtttcagggctggcaggggcagaaaaatgtctgtataaaagtggacctgcatggttcaagcccatccatattgttggaaggttcagcggcgtactcatatatgttttctagagaaggaatctatagttaccgtaagattcttaaagctgttgtgattatttccctaggccttttcatttggtcttccaccgcagcctgtgcaaactcccatcataatcccagttgcacatcatttatcttgctttacctttctatctcagtgctcattctgaatatgaatgagtttaatatattttcactttcagaactttttgtcaggcaatcattacaacatcttttaggttctgcccacctctaagcctcctcaccaccactcccgccacagtgggtatacttttcttagtttttgcctctctgtcccacctctcaaaactaagagatttttagatagtcataattttcaggttcttttttttttttaatttttatttatttatttatttatttatttatttatttatttatttatttatttattttttgagatggagtttcactcttgttgcctaggctggagtgcaatggcacgatctcggctcactgcaacctgcacctcctgggttcaagcgattctcctgcctcagcctcccaagtagctaggattacaggcgtgcaccaccattgccagctaattttgtatttttagtagacatagggtttcaccatgttggtcaggcaagcctcaaactcctgacctcaagtgatccacccacctggcctcccaaagtgctgagattacaggcatgagccaccatgcccagctcaggttcctattttttatcttcttttgtagaacaaggctctattaaactcccaattggtatttatatgtcccaccttccagcccaaccatatcatctaataatatccgtctaaaataacaatcaactttggaggtgttttttttttaatctataaattgatgtggctctactaatgctagtatgtagccggagttgtgaatcatataaatccttcagaagtttatcatgcctgttaagattactattactattaataaaatcacagattgtatcgtatttagcattagaagaagtaagtacttattattgagacttggcttttgtttttctgagattgttacttttcagtggatctgtttataccttgttgaagagaggcagaacatattgtcctaaggtacaaatctttgttagttttatatagttttaatggaggaggagcatcatatttgtgtgtgtttgagtgttttaagcttttctggttaaataaagtgcctgacactttccctctaccttgctttatgtgtggaaagttgttgattggttacacaggtattgagaactgaaaaaggagaaagacaggctgtaatacagatttagagactgcaaaaaaagcatcttttaccccagggctggaataaaagagaagaaagcctgtgtaatgatgaaaccaagaccctggcttggtgtctctcagctacttcaagaacctcaggagctcagaggggagaaccctagctggctgcttctggtgtgcatggagggaaggggctgcacgatgagactggttctagaggtgctgggaaagaagcatggagccaggagacagctgcctctggcaagtgcatagctgaaaggagcgcacatgggaaagagaacatctctttccctcatccagctcttcagggtcggctgctttacacccacactatgcctcagttctgagaacctcacagaaaaccggctggcaaagaagtagtagttgtagagccctacacttaagcattggaaagcatatggcagttcagtttggaacttagtaactgccacatcatcttggagaaaaactcaagaaatatgaaagcatatttttctaccagctgtataggataagttggaataagttgatcaaccagatgaatattcagctgtgtacctgacatctccacttaggtgtttaagataagtatttcagatgtaacctttcaagagagaacttctgattccatattcctcaatttttatctcattacatggagccaccgtctactttattgcttaaatcaagaacctaaacaacattgttcaatttctccttttcccttaccctctgtgtccaactgatcatcatgccttgtcaggttaacataactcttttcatctctgttacaacctctaccccagtccagttcatcctctctgttgcctggacaatgttaaagctcatgacctatctcagtaatcacgctggcgcccccagcagtccatccacaaaatagcacagtgaggctttaaagacaaatccttttttgtcacttccctctcataaacccctttgtttaagtcaatcaaattatctgtcatcttctgtctgccaaagctgtcggagcagatcaaggtggtaattggcatcaaaattcttcataaaatgtggtcactcatcattttttcttttctctgatatttgttattcttcaattaaattagtcatgtatttttttgtttggaaaaccttttctacccattatttcaaatttatagaaaactaattcattttttaaaatatgttgagcacattcatttttgcaaggctttgggggttacaaggaacatgggtttattggttattggttagtttatggatacaattcatgataaatttctttaaaaatcaaaaaatagaaaaactgagatagcacatggctatatatgattgatcaccccaaaaataagcagcatgaatttataaaagcaagaccagtatgcgtgagagttcttagaaaagcctgcactcaggagaatcgcttgaaccagggagttggaggttgcagtgagccaagatcacgccacagcactgaagcctagcgacagagcgaaactccagctcaaaaaaaaaaaaaaaaaaaaagcctgcactctgagagaaaacgatgatctgtgttattgaggaacacataggatgcttccaataggagcctaacttggagaggaaagtaccaggtctactcggggattgtggacagatgattttgactaatgcaaaacatttgcaagcaaggttgctcatgtaaactgttcaatgccctgaatgctggagaatttgggcctttgtgataggcagtggttcgaattatttttttagttgacatagttttaatgatttggaaatacacatttgtttcagctctctggtgattactttgttgtagtttttttttaaaagtatatagatctaaaaatactaaataaacatgattttcttactttctaacatgtggtctgatgaattcaaaagatacttccacttaaaggcatcataagactggagaaggtataatgtaatggttaaacatgaggactttgaatcaggtattctgggttggaagccaggtttgcaatgtgaacttttgtggctttggataagctgcctaccctgcctgagcctcagggataatgcactgccaataccacacatttgttaggaagcgtaaatgattggataatgaagatctagtgtctaagtctagaaaagttgaacaatgtataaattacattaaacgtgacctgtttgtatccttttaacatagctgttaaacatagttgatgatggctgggcacagtggctcacgcctgtagtcccagcactttgggaggccgaggcgggtagatcacctgaggtcaggagttcgagaccagcctgaccaacatggtgaaaccgcatctctactaaatacaaaaaattagctgggcgtagtgacatatgcctgtaatcccagctacttgggaggctgaggcaggagaatcccaggaggcgaagttgcagtgagctgagattgcaccattgcactccagcctgggcaacaaaagcaaaattccacctcaaaaaaaaaaaaaaaaaaaaacaacaaacaacagaaaaggcatagttgatgacatatctatatcttaatatgcataaattaaaatatatatatttatacatacccataattggtcatccttaattgcaagcctccagaagttcagaaaactgtgtttatagttgcttcaccccacttagtgtgagtatttttctgtttgttacggactggattatgggcgtatcccccagactctgctgggtgttatagaatctgtggtgtattatctttctataaatctgaaaaactctgaaattctcaaggcacttccccgataccacaggttttagctattagcaggagtgtgttctatttttgagcttttacatttcaaaagtaaagacattctttgttgtgctttaataatctttccataatattttccatacaaatacaagggaaatattcatctgccctatgacccagcaactctactcataggtatttatccaagataaatgaaaacttatatttgcaaggaagccttatatgagaattttcagagtggctctgttcacatatccaaaaagtggaaacaatcaaatgtctgtagcagaagaatagataaataacatactactcagccattaaaacagatgaactacagcgacatgcagcaatatggatgagtctgacagctgtcatactgagggaaagaaattgaacacaaaatattatatatgccttcattatccgaaaatctagtctaggcaagttaaatcagatggatggttagggcttgaggtacaaggagactttctgggtttgtggaaatgtcctgtgtcttcaatggagtactatttagccataaaaaagaataagatcctgtcatttgcaacaacatggatgaaactggaggtcattatgttaagtgaaataagtcaggcacagaaagaatcttcacatgttctcacttttttgtgggagctaaaaaaattaagtcaattgaacttatggagatagagtgtggagcgatggttccagaggctgggaagagtggttgggagggcacagtgggaatggttgacgggtacgataatatagttagaatgagtaagatctagtgttcaatagcacaacagggtgactacagtcaacaataatttatcgtacatttaagaataattggattgtttataatacaaagaaaggataaatgcttgagttgatgggtactccatttaccctgatgtgattaatatgcattatatgcctgtatcaaaatatcacatgtactttatatatacatacacctactgtgtgcccacaaaaacttaaaaaaaaaaaaagaaatatcgtgactggatattgcacttaagatcttgggagtccactgcatgtgaattttgcttccattttttaaatgattcttgaatatagggcaaatacttaggaaaccagaagctatgagattgcggataatcacttgagttcagtattacaaaatatgattttaatgacccattttacaaatgtaaaagttagtgttctgtctctgtagagttgctcattcccgatcaaggttctgcaggatactttgtgaactatctggagttgacatgtacaacttcaggatgccctgtttgatcagttgtaatttttgagaaaaaaagaggtcagaaaaactggtctgaagactggctcatagaagctctagagcctctagactgtagaagaaacttagttttctcatctgaacttatatttgaaaaagaggtgatatataccttcaacagtgtttaggcaggtacgtactaccaaatctcattgtcaaaaccaggacagtaacattgaaataaccacttcgatgtgaaagtaattctataattaaccctgttgtctcttctttttttttctttttctttttttttttttttgagacagtctcgccctgttgcctaggctggagtgcaacggcgcgatgtcgactcactgcaacctccgccttccaagttcaagcgattctctttcctcagcctcctaagtagctgggattacaggcacctgccaccacgcccagctaatttttgtatttttagtagagacagagtttcaccatgttggccaggctggtctcgaactcctaatcttcatgatctgcccacctcagcctcccaaagtgttgggattacaggcgtgagccaccacacccggccagtgaaccctgttgtctcttaagacacacaagatcatgccctgtgaatacagagtggaggggagtggtcaggacatgagggtgaagcccatcctggactgagaccacctagaatcaaattccagctctgccaactaaatcctgtgcatttctgggaggcattagtgtaccctgccaaaatgtggctgtgatctggtgtaacataccatcacctccagcaacaccatatggcagactacaccaggatctcctcctatgccactcttatttttattctcttagggtgatctctcctgttttcattatcctgcaccctgcacattacacaagtgtgcacacacagtggtaatcacacacatttcttccatcttttttctctgtggttttctcccttgtttgacactccattgccaaataatgaatagctattttgctatccaaaaggagcagttcagtgccaacatgttttcaagcacctgcccttctgcaggaaactcgtctttcgtctttatttcctctttgttggaagtaaatttgccctcttatttgctgacattttcaaacttgtaccacttctttctcgctatggtagatgactggaggtaaacctactgctcttctttttctttttttatgtagagtataatttataatacttttggtattccatttttatatataaatttaaatttgaaacttttgataagttttaattttcaaatgactagtttttagcaaataagttgaagttttattataatggatttgattcttcttttccaatagtagcttacttatttcgtttttaacaaataatttctgtgtctttctaagatcatacttactttttgttcatctttgtacaagttgataggagtcaaattctacaggcatgccagtatccactccctgtaatcttctgcaaagtaggtttttaaaaagttggcagtagcacatcaaaacattgtctttatgtttcactcatatttttctttaattcttgtgatttactaaaagctcactgaacagttctgtttactatatattatagtataccattcaccattgtaatgccaaaaacagaattttgtgtgtcattacagctataatagaaaggagcactgagaagcctgtgtcctggtcgtccttcccgttttatgaatcagagaggaacaagactatgtcagaaaattgttgcattgtgttactttcattgtaaatatcacaaagtcatgtaaagttactgggattcgatgatacataaaagtggggggcagttagttctatctctacacagactttgatagatggaccctcatctactgcttgctttgactgtggctaaagtttatgttggactgagacatttgggatttggaaataaagttaaagacttctcataccagtcacttataagttctagtaagtaacttgggggtggccgtgggaacatggggttaggcagtggtaacaaagaaataagccctattctcatggagcttactttgggagtggtgatactcaacagactgtaatttgaagtagaagcaattaactttgtcgataggttcttggagatacaactttaaacaaaatgagtatattgcagcctcttttttcatcaatgttataatgaaaccatgttgaaagcagtggcattatttgaggacctgctgtctgtcgtttcacttaaagttagttttaaagaatgtattgaccacattaagtgaggatctactgtaatctagggatggcccctggagaaggaaggtagcatttaggttgaagtttgtggggatggggataggtaggatttggaaagagagaggggcagagagtgcgcaggggagcacttaggatggaggaagtgggaatatgcacagagatgaatggtggagagcaatctggtttgacttaagatgttacttacatacgtgtgtaaagtagtaggttaatgggcttaacttgagaggatattttgggaccagattataggcaactaaagttttttatatttttagatagtaagaaaccatgaaagtgttttgagacagaatgttgagaaacatgatgaaaattgtgatttgggcaattaatctggcctttgtgtagagattgattggagaacagacaccattagcaacatgttttagtagtttgggtgctatgccaaaaacaactggaacagtaaatggaaagagtgggaccaattcaaggtaaatggggtggccaaacattttgatgattagagactatcctgatttaggtttgaagcatggttattattagtgcccatttttgcttttaaaagttttctgctttggacaataaatcatatggtgaccctaaagatagattgctgtagcattgatagcacttgctaattagattgaaaggagacagggatggtggtgtaagagagcagaatatacggttttttagaagttattatttcactgagttttcatattttgaagaattaagcataaaatttccttacctaaattctgtaatcaaatcttgtatgtttaaaattatttgtgtgcacatgtgcacgcgcgtgtgtgtatgtgtgtgtttaacgaacacatttgagttttggaatattcagcaaaatgatagttgctggctgggtgcagtggctcacacttgtaaacttagcactttgggaggctgaagcaggaggatcacttgaagccaggagtttgagaccagcctgggctacaaaacgagaccttgtctctacaaaaaataaaaaaaattagccaggcatggtggcgcgtgcctctagtcgcagctacttcggaggctgaggtaggaggatggctcgaacctaggaattcaaggtggctgtgagctaggatcatgccacagcactccagcctgggtaacagagcaagaccctgtatctaaaaacaataaaattaattaaagtaattttaaaatgatagatgctgaagagaatatgttatgtttagtcttatctcacattttcattcatttctatttaaaagtaaagctttttaggggaactttaataaatcggtgtaactgacaaaaaatttacaaatacaatatgctgtatatcaacatgcctttactgagaaaacagagaaagcaggctccattatgttagcaccttttggttcttgatctttttttccccttattaaaacaggtgactgtagtcacatgatacttactttaaggcttgtgtgtagatatagctattatatttgtggacagtctcaaatgctttcatctcatgtgttttccatgtataggcagaaggagaagacagcctgaagaagatgcagctgatggagcttgcgattctgaatggcacctacagagatgccaacattaaatcacgtaagaatgagctctgaggcccagggttactgctgtctgcgttgttttgtctacagacttttttccttttggcaacacaataatagttcatacaaagtgaacagttgaaataactgttctgtcacttgatatggggctgacagtcctatttttaatgctttcatgaattgaggacactcttgattttattttatgtcagcatgttgaagttttaggttgataaacttacattattttaacaaaatcacaatctctaaattcaagtgtttaagaaattttctgtttggttaactacagatgtagggcttgcagcttatcttgttaaatttatgcaaaagacaacatattgaaagcttattttgaaaaagtgaatttgaagtgtatctgactgaaatgaccctctgttgagttctgtcctttcactttgcttgcatgttttccctctagtatttttccctgttgatttcatatgtgagttcacagagatcagtgggtgataactctttttccgtcctatttttgtttttatgcgtatctatgcatgtttttataagccgtaagaggatagcttttttatgtttaaaatgaaataatgtgaaatttatattttgaaacaatttaagattcatacatgtcatttatatgaacataccatgtttaaattactgattatttaaaacacatagaatttttaagttctagccagatttagaagatgtaggcaacctctagtgggtttagaagtagttactttacaaattgttgacattaatttactcatgaaaatgtgagtatatcattaataggaatttagaagtagggctttttaagattttctgtgacgttggttcctaaagatgcaggaaatgtacatatatacctagtggttacttgactaaatgcaataaaaattattctttctttactttgaaactaaagctgtactttagaaatataccaaaactgagtttctgtggactccggttacaaattattttttaacatctgttaatgcaagtgtttcattgtgcttctgcatgtactttagtcttatgaaatcttagatatatcaaatgtatgaactaaatataacctatttaatggtgtcattcatttttttacaatggctttttaatttttgcacattcttaatcacattgggaaagggaaagctgtttgcatttgattggtgtgcttttgcatttttgtgtgatcagcgcatgtactaatgatttccttttatttttcttctttcctgcttttcctttctttttcctactcccttctcatttttccgtattttatactgctgtctctatacttctttctaaatttctttgcttactgtagcagcccttgccttttctcttgcagcaacagcccaggctgctccaaggatcattactgggcctgcgccggttctcccaccagctgccctgcgtactcctacgccagctggccctaccataatgcctttgatcagacaaatacagaccgctgtcatgccaaacggaactcctcacccaactgctgcaatagttcctccagggcccgaagctggtttaatctatacaccctatgagtacccctacacattggcaccagctacatcaatccttgagtatcctattgaacctagtggtgtattaggtaagttcttctccccatggggttaacaacattctctttataaatatttttgctccctcagattttgaaatgattttatcagttttagagaggcaagacaagtttgcattagggaagaccgaaaactaaattttgttttatttcagcctctcataagggttcccctttgaaataattgcaccttaaatttattcagatccactttggtaactgaggttcagtttggttgggtaaatctgttgtgtacatttcaacaaatacttttacatttgacattactgaggtcattctgagttttaggtcccaccccattggcccgtcacctccatcagctccacttctcaaactttatttgagatttattttatctcacaggtttgtgtaattgttggaaaatttttaaacttctaagtgaaagtagtctgagcgctttataaaattcatattattgtgtgtgttttgtaatatttgcgatcacttaaaatatcagataaatacagtcatgcatcgcttaacaacggggatacagtctaagaattgccttgtctggcagtttcatcatttggtgtacatcatagagtgtacttacacagacatagatgatatcgtttactacacacctaggctgtgtggtatagccattataatcttatgggaccacatagtataagtggtccgttgttgaccaaaatgttgttatgcaggcatgactgtagttgtattcttaagatttttcagttcttgtgttttggagtcctagtcatattaaacatgagagatactcttaatttcagtagtacagtatggaatagttaaataaatagcaaatcactgaattcagaatctcacttaaggcagaaattaaaatcataatataaacgcttggttttacatgaacaaaaagtggtgtgctcgaaaaagacattactgatgccttttttttatagagtggattgaaatgccagtcatgcctgatatttcagcccattgacttgctggatgaaggactagaatacagcagctgttataacacgaccagtcaatgtggaacaaactgtttctgtgcaacccctttgttttaccagacaaaatttgaatactttttttcctgaattgtatatgaccttggtgctgcatgcatgctgttgacttttaggactttgatcttttaaggttttttttccccagcattaatattgatttataaagatttgaaaatctttaatgaactggagaacactaagatttaaactcgaaaattcgttgttcaagtaaagaaagccatgatgctctgtatgttatctgtgtgtgtgcatgcactcaggtgccctttgtttcatgaacaaatacatttcattgtacatgttttctgtttaaatcattgtataaagtaattgcaggtcagaattataccacagaactgtttatgagaggcttgtgtctgttgcacatttcttgaagcatttttaaaataacatgtaacctgtaaccttgttgtttaagttttcttttctattaatactctgtcctgtggtcccgtgcatgctccttttcccagaactcctctctgctgcacccacagcatctgttcccgaggagttatgactcttgacttcctgcagggctggggctcttagccaccagctgctgttccagcactttcagcgcaagatctccctgattttgccacgtggaattgtacttgtatatgattaccttatctaaaatgaataagaggtgatggaccagtttactgcttagaaatagcaagaggcactgcagtaaaacttgtttctcattgtaaagcttcatgtcttttgtttgttggaaaatttttacttatagaaacttaattattagactggtaaaataaagaccaaaatatgcagatttctaattggcattcataaggtgaataataataagtgcccaatgaaaaaatctattatggttaatttcatttcttgctttgccacctaagcagtaaaacatgatattgaccacttggagaactcagaaaattattttaaatttctaagttataataaatttgcacacagataacatgcatgctatttatgtcacatctcacattaaattattttaaaataagcagtgcccttcaaaacagatgcagacatgtgtgttggtagtagtgaggagattggtattagcatcaagtcttcattgatgactaatttttaattcccttccttttatctttaggtatggctttcccaacgaaaggctaagaattcaagaacggtcttaactgaaccctcatcagatctgaatttaacaaatgcttagtctcagcagcctccgggggaaaaaagcttagcctagcagtcagtgacttacttgcactttttgcacatagatataaagtaaaattatgttattaatttggtttagtctgtaatattacacagtaatggtaatttataaaggagtgtatagtagtatactgactgctaagtgtactatactgtttgctttactaatcacctaattcattgcagttcatacttattgactcagagtttaaaaccacaatctgtaggctttaagaattgcttttaaacctttttaagtgataaactcttgaagtggtcttaaggttagcaaataattgtctgtattaaacatggcgttatttaagtagtcctgctgcaagaaaggcacttcagtgaatatgtgactagtaaagcttaaatatgtttggatctaatagagctcatgaaatactgtaacttggggattgtaaatgaatggatacaataggttaaggcccaagatgtttgaaatgaatgcaatattaatagatgcatatatacatgacatattgtggttaattttaaaactactgtgccttaacgtgtttcttaaacttttgtagtaaatgaacatttgaaatccattttgataaacctgctgttaatgttttttccccccttgtgaatgttttctaactttgtcttggtaattgcaatttaactaggtgcggtggctactaaagttcgaaggcacgatatgcgtgtccatccttaccaaaggattgtgaccgcagaccgaggttagtttagttctgcagttcttgtctataagaaatgcgttgggtgtccataaaatttgcaacaccacacctgatggaaaaatgtaattgcttacctgcacacagttttttttccttttctaaatttgtttgtgatcattgacagatttaagggttgggttttttgttttggtttggttttttctcccttcatattttaacttattaaatcttctattattatgtactatgatttattcctactaaaacataaattagtcaatttggggagctattaaattttgatgttgcctcagttattttcattaataacttttgctaaaatttaccttttaaaagttctgaaatttggggttggtattgcaaaatgaattgaacggatggtgctttaatgagagaagtaaaggaatatatgcctcctgtgtacttttggagaaaactgaagatttagtttccatttttctttataataaaatatttgagccactgtataaacatgagggtgcacatgtcaagtacttagctaaaatcaacaaagtgaggactgtgaagataactttcatgtagttggatttttttatataaattagagcgtcaattcccttttattcttacattctcttgccaaaatggatcctttgatttttgtcatttgctgctaaaatatattatctgaaggtaaactgtctcttgaagttctgtggtggtatgagatccagctgtgtgaatataatttttgactaacctgtgactggaaaataagtcttcatttttctcctttacaacttttataatttgtgtcctgtatatgcccttggacccttttataaattatttttgcttattgaggaatggtattttcggtttattgacattgaattgttttctaagtttttccatcacaagataggaatatcaagcatggtagtaaaaaaggattttttacaagtttctattatggcacatttgtttcctacaaattaaattgatcaaagtctcaaatattagtggaggaaaaagtgctggatttgtacttcaattgtacatcttctatgaatttatgaaggacctacctgctttatgtgattaccttgagtactgatgataaatactagacacagctgttgtccacatcagaaataacatgcctttcccaaagacattgttaatatttgtttagcataatccataaagaacgttgaagacttttaaactaatgtattcatcactaacagtgattgttcagtgaacaaaatagaccccagctccgtggtcgtctatgaggatggtattccttgtaagtgttctgtatgagcacgtctcatagggatggggaagttttttggaaagtcacttgagttttaaagaaactggacaattccatgaataatttgaggttttattcatattgctaatgtctacaattgttctaaagagtattttaaagtagtttttttcccccagctaatctttccctatgtatgcccccttttaggagatttctcaccattttgctttaacacaataattattggcctacttaatactccagtgccttgagatagttggacatattttaggaagattttattgtatttggaaaattacgacacattccatgcatggatcttttgtagttacgtgttttgattagtcctgtcactgtttttatttaaaatgcagtgtcagcaaaccgaaatgctcatttcttttttagtaacagagtactcgtatacttatcactgtatgcactcattgggtctaagggagatgtctgaagtccttcacttaaattattttatgatactactgttttctctatttttgaggttaaaattattttaaaaaaatattttgaagagaagtttattagtataagcattcatttaatgcaaaaaaactcagcccttggacatataaccatgtaattctatatgaacgtttagagtactacatggttgaccaatatctagttctttactaaaagtaaactcacctctttatatatatttcaaaactgaatttgaagcctattagagaccaactgaccttttagttgtaatgaactgtatggtcttgcatggtgacacacctgtgtaggaggccaagacttggcagaggatgtagtctaggtgtcctggtatatataaatggtcactcacttcgtttatatattccacactcagaaaagaagtcagagttttttctgagtaatacaaaaaccatcacttacataatttgtataagaaactttaaacagttttaatcaaaactatgagtaacatcaaaaatgctttaagattctatattttggaatacctgtgaagtagtatgactacatcatgttaaatatttattttcttctatgattttggagcagcaatttttattttaaataaaattccacttttaagaaattcagggaagatttggtcacattgaagatacagtatttttgtagtatttataaactgttctaaatgatagactatagaaaacatttttgtcatatgaaggtaaatcagtccattattttggatcatttaaactgaacattacaccttctgggctttgatttatgaagtggcacagaatctaactttgcactgaatatcttttcattcacatctcctctgccttagtcacaatggcaacagtacagaaaattctatcaaacctcagaatatagtagaaataattaagctgttgaatgagtcttaaaaattatactactgttaagtggaccaagtttggtgaagcagaatgtgacaaaggttgattaaggaaggaacaactcaaggacattgggaatgataacttttccacttgagaactactttatgttttactgtaatttttaaagtttttttgtcctttttgttattttgcaaaagaaaatagtatttacaggtggcttcttttaaaatataaaaatataaagcaggaatgtatatgaaatgtcagattttattgtatttgcagagtattagctttgaaattgaataaagaaagctgtttgtagttttaaaatgccttattggtatcaattagaaatttcttctattttttgatgtacttagagctttttgagtgtagaattttaaatggcaggattttacagtgtttacatgcaagtgcattttataagtgttctatatgtgtaaaatagtattttcaactggaaagtgttggctagtgcaaaaggcctggccattttctggttcccatgatgttgcctacactgctagactacagtttagtatcgctttgtatcatgaggccaagaaattccatgttgtttgtaaatagaataattgaaaaagcaataaacatttattgaacaaaagaaaccttgtttggcccagagtttatgttgaaccaaatggttcatagaattttgaatttctttagattcatttctgttaatcatcagttattaataatcacatccatcattaatagttgctttaatgcttgcatcttagagaatactaatgcttaatagcagtcagatactgataactgcactgactgtttaaaaattctgtataccaaacctattcattgttgtttttcaatttccttcattgactgctactaactattagttgttagttgtattttatttctattttttcttgttaaccagttttttttttttttttgtgggagtgggctcttcttcatttgttcaaatcatgatacgaaattgtcatgattttaattgtattctgtagatggtgtcaatcagtttgtcagaattaaacatgcttttttttttattagttgtgattagtttttcatgttgtcattaagccgtcactagctgaaactaatctcttctctatcttttcttttcttttttttgttttgtttttttttgtttctaaccacccagccgccaccggcaactaacctatgaccttctgacctctgaactcttcacccaatgatgacctgaccatgcctgcctgctgatcagttaactggtaatcgcctttgcttgcctgtcgtcagtgcagcgagctgaggcacttgtccgttcgtcttaccatctaaccaaacaaaagacaaagaaattgttgtcctccaactcagctttttttttttttttttcctgtttgggtgaaagtggttctagaaactgcactgaatagtagtaaagcaataaggcccaattcatcccacagcactgatcatcttttaatatcccaccctaagcgaacggtaagaaggcctctcttaagaaggggagacagatggtccttaactactcaatgacagaggcagttactgtgagagacttctaggaatctttttcttctcatagcgaagtcaaagctctctctgaatgtactgtgtgatgatgcatcatgcatgaaccttcggtcagggatatcattggtgaagtgatttcaaaaagtattcaaaatttgatatgctgtttagtcactacagtgccctcaaagggcagaagttgcagccttttttatattgcctgccaaaatttgaagtattagaagaaagtgtgccatgagagaaaaacttaaggagttttgaaaagtaatgcaaataacaaaactgcaacactatttttaaaaagataaatatctgagttaaaattactgaatctttattttacacctaaaaaaatatgagaacaaggtacatgcattatgtgtcacattactgggcaaactgttcaagtatttttttttaaacctccctgtatagaaaaaaatcattaaggatgtaaaagccatgcttgcctatttgctgtatacatgtaatgaaattgtagataaagtgtagtgcattgaaacaaatgaacaaaaagtagatacttttactatacaagggtgctggtgcagaaaaaaatatatatatttttggaaatgtagcattttatactttcaagtgttataaaaaaaaagaaaaagaacaaagaaaccctttatttcattaaatgattttttctggtggttgtcaagaaacaaaagaccaaaagagcctttttgtctttcttttttattttttaagtattggaataagtctaaagaaaagaaagtgccttattttccttcatggtcattcagtcaagtgtctcataaagatcagctcctccctcagaatacaagttaatgcatgttactcagtcgcccagtatgtgaaagaagatatgagggagacaaatgagttgatagtttgaattataggatttttgccacgttaccttgatgcaaatttgccaaatctgatactgtgaaaagatttgataacttttctaatgcctgactagtaagttttaaaacatcattctttaaaagaatagtttaatacttttggttattccaatcttcaatgttaacccaaaggattctgagataaaaattatgtgtcatctaaacttcagtttacagacaaaattagagctttgttttatttggagaagggggatgcattcatttgattttgttttttgtttttaattaattgaatataataggatacctagcaaatgttttcacaaaagtgaatctttgtgattttcattctagaaaacaatgttttaaatcacccaaatttaatcacatgtctttatatcataccagataactggtgtagtgtatccttttactgtttcaataacctctgcctcccccaccccttaactttaaaagaatgtgaaaaactagcatcatagtgcatataaatactcaaccacatttcagcttaagcttctaatttctcaagaagttgaaacagttagttatgtagttgaagcaatttgtgtgcaaagcctacatctaaacacttgagtgaataatcattaactgctcagtaccagacgtggcaaatctcaagtgacagtggacccccccccccgcccagcttatcaactcgtcccctcttccacaccttcccagcatcacagtcagaggtcagcaggaagctgagtcattaccttcttggtgacctcccccaccatcttgtctcacttggaaaccgttgtcagtttatttactatgcaatagacattcattgttttgtatccagctagctttggtttaatatgccactgctttgtctttctgttacacatacagttttgatttatttacaatatatgctgtgccattttgatttttatattgtttggttggttgaataaatttgcgacactcaaacacttgaggtgatagttgttaaaaacaataccagtatttgatccagtttcatctcaactatgttatacctggacattttagatgtttatcaaaggtcttttatggggaagaaagtaaatgtatgaaataataaatgtgtgacatttatagggaatgttggctctgaacaaacttttgaaaacttggttgacaaaattttggatcaactgaaaaaagcatgacttttgaaatctctgaatgccttggttctcagtattatcattctttattgaatttatttcttattaaaatatgtagtttttaagactttttttctgacagtattatgtaattttttagcgtgggtagatgggagtgtcgcttgtatgttatcgtacagctgacatgtatttttgtctattctttattatcttagtttcatgctatgtatgtaccataaccaacctattgcctatgagaaacatgtaagataatgtatttacagccattgttacaagtttataatgtatttttctatcttgttttatatgtatgttatataacattcaaaaagaatttttttcttgattgagaaaaggatacaaaatgcaaaatccacaattttgataactgaaaattgccaattgttttgcagtactttattatattgggtgtcttgtcttttttgggcttttagttagctaatgaatgaatacattagacacttttgggttttagttgggattttacatagcttgcattttaattctttggttctttgctgtttctattaacccacagcattattttaataaatgttataataccaacctactaactctggactttgtctgtttattaacctttatatgtttaattaaaataaacaaataaagacaaaagaatgtaaagtcttgagttactggactaaccctgaagaacgtgaccacagataacatagtgtgacttgtttttatgttgtttgtcagctgacagttttgcacactactgttaaaatggctttggttattctggtcttttagcttgggggccggggcgggtgtgggtgtaggtgcagtagagatgggaacaaagtagcctttgtttgaggcattcttctcttgccacttgcctttcagcatctgcattactaattccacaccttatttttccttctccaaaataatcactgtctgctcacagcatcgagtaaaaagatacattgtcatggtatatacctggagaaaccagtttgattctttgttgaaccatttcttttaatttctgtaaataagtaattttatggtcacattgtaaagcagagaaactgttgatattttacctttatttagatttttgttttaacttgacctttttcctttggaaagcgttgaacttgtttagctaactactcctattaggggagcttaacttgggtaaagtcaaaggcccactggctgtttctcatggtggcctgaagccccgctgctttccagtgaggaaaagaaccctcagcacgttactgagctttcctcaggtatttttttctctgtcacctactttacaaatacagtcagactaaaacattaaacaagaagtttaagggggaataacattgggatttgaaaagttgtatgtgattaatttcttgcatgcaaatcaatttaagatttcttaaatatcttcatgcttttcttggctggaacttgggtaaattaacctgtaattatgaattatttagtttaactcaaggtgcatttttatttcacagattgatacttgcttttttctgtgaaacagttctcctagataccaaaatcctcaggatgaatttttgcatttgtaaataacaatttatctttgtaaattacattttatttatttagagttctaaaattgagggctgaaatgaatgacatgtaatagaagacaaaactgtaccaatacgctgttaaccaatcagactgtccaggtattctcatttcataaatatgtatacacacatataaatacacagagtagtgttagctgatgtgagtgataacagcgaatcaccattgagatggtcatttggatcatgtaaacaaaccgtgtcatgtctctgatgggagcggtgggtagtgtactgttaggtggacaggtcttttaacatgctactatttgtaaaagtttccgttgccataacagttcatgtagtagtctgtgaaaattcgaagctgtctgtcaagctgctaatatacaagttgtcatggtaccatgtaacttaaattgatgaatttctatgcaatttactattctctgaagcctatgaatgcagcctcatctcattttcagttaagggtactttatgtataattatgtcattgctgccttttatgtaggaaatgtaaaaaagttttaaaaggcgaaaataacattacagatttcatttttatacaggttacaatattaaacatgaaactaccaaattccaagaatagtaaaattctagagtcagttgattgattgaaactatttgacaaaacagttgaaagctgagctttcagtcaagaagttggtgaaattaatgtccttaaacttttcctttaggcaaaatgtcagggaaaacttaacatgaaagtagttactcccatacgcaccagtgcagtagctccaggtgtaagaggtcacgaaggcaccctgcccataaaaccaggatgtgcatacgtacacacaatcggtgtctggttatggttttctaaacactacataaggatctgaattttttagtgtgccaaaagcaaacgataggtttaaatgaaattgctcactaccaaatcaagactcttcatatatatacgtgtgtgtatatatatatgtcataacactttcacgtgtgacagcctaaggtttctttagttttaggatggggtggggtgggagtggttttgcatgtttgaccaggatgtgatgcctgtctttattccttgataagaagtagctgttacagcatttcaagcaaattattttaggtagaatagaacttactgccaaatgattatttatttagcaaaaattattctccaacttttcgaattcacaatttttctaagtgcatagagtagttttttacattgtcacgaattccttaatacctttatttaaaatggaaaaaatatggacaatattttagaaatatgtgctacacatctaattttatctgtagtttaagtgatctaaattgagatgcctttgatatgaagagatttaccaacattatatgcactcgtgccttcaatgtggaatcaaactggttaacctcagcacagtcctctcgtttctgtgtttctgctgcactaattgccagggggtgggggagaaggcgaatgaattaattcatagtagaaggaggcgataggtgcagcaaagggcagccacagtgttgattccacattataatgttgttgcctcttcttggcaaaagacaccacattgtgggaagatctcagcttccagggtaaaagttaatttataacttaaaagtgctattaagtttttattaccaaatatatcttttatggtttatattgtagtggtatgtatgaaacatttaaaattttactgtggaaattgtgtatatatatatatatagtcgaaataggtgttcacaggtcacatgtgaacggagaactgcatgaccgtacatgaaatgcaataaaccaactggaaaaagtgcatgtgcttcatcctctcaagccaactgcagctggaaagtgctgcttatcctccacccccagaaaatgcatgtatcaatatgagaataaagaacgcacactttcaattttattgaggctttcaacactatttaaaagaaaatgtaagaatttgacattctggagttattataacattagaaaatgagcataacattcactctgattttagccattaagggagattagtaaacagactgctacagtgttccatagttggactgtgcatccaaaacatttttttatctttaataaatggtacagtttttatgtagttttcgaatgtaagaagaaaggaatgctgaccaaaacttgatttcatcagcttcatgaaaaggactagtgtcattaacctgttgaacagaattggtttattaaaaaaatcatttccagtagtgtgaaacctttacgagtctttaacatctaaatgttatgactccttgtaccttaagttttccagtctttcttatttatatcatctccaagtacctctggctcctttcctcttgctcaccggaaccttagttttcctcaacagaatgctttgttaaagtagcccacagttgcaggatccatagcaccgtcgtgcagactagcagcccaaaggtgtgtttggtttggcttatacggtgttttgctttttaaactacttgccataatttaaaagtggcaacactagacttaaaaaaaaaaaagtctgattgcccatattagattttttttttaattcttcacaaaatctgctcttcctgaaagatcaaagtgtctagaaagcccaaacatgtattcttaacatagtaggcaccagctgaaactgagtaattaaacggtcccctgaagccaagtattccctggttagtcgccaccccaccactccttcctgtctctagtgtcacacttgggctgttgattttcttactcttctcttgctttaatccttccccccggctctctggctcctgtggatatctgtgcttgtttcctggtccaggatggtgatctgactttcaaaccagcttctcaaaaggggtgacataaaatcagttttgatgtttttcctcctgaaaaatcagatgaatattttagtcactgttactcatgcacattgtgttcttatgtttacagaagtgcttaagtgaatggaagcactagacatttggatttccttcctaacgtaatttttaatgattaccccttttatacagtaatttgtggtctttagaaagcagttaaactaattgaccatctaatagttgtactatacatatgtctaaaataatagtcatggtaagtttggcatcatatcttccccaaaaaatgtttattaaaattagattattccagtttaatgctattttgtgaactgtataccctctgaaagcgcttatttttacatgctacacaacagttccaattttaaggagtgtctcctaaaattgggatgaaaatctactgtagtctgttttaaagtatgctatactatgttcattggttacttaactggatattaatataaaggttattacaagaaaaatgatgaagagcaaaaggagaagaaaatatttgcaagtgaatccacaattcttgcagaactatttgagttgatactaaagattttatgttcactcctttaccttagaactgtcaagcttgggaatgaggaaagtgccttggctgtgcttgaaacctgaattttagtgcttcccttattacattcattgttttcaatgattgatttataaaattaagacatactggtagtacaagttgaaagttggtttgaatacattttaattaaatgataatatgttaatatgcttttgttcattgctttctcactgaggtaaaacagcattaaaaagttgtccagaatttaaactga

SEQ ID NO: 144 - DNA, 16091 bp, Homo sapiens
gagcggagttgggggttgttgcgagccctggaggggagaggagacggggaggcgacgggatggggccagctgggaaggggacgcgaggctccaggctggactccgctctctgccccctcccggactcggctgtctgtcccctccctccagacagggtctgctgaccaccgcgtggcctgggagtctccggtggcctagggaagtgaagcgcggccctggggaaggcctggagcaacccatccccagaactcccacgagggggcgtcccaacccgtcttcgactgttggccaaaatgcgctgccaatgctggcagccttacgcagtgcccgcgggggatatgaggccccccgcgcggccctgaaccccaccggattccccgggccggcccgaccgcccccacctagtccctggccccgcgagtgcaacccccgacactaacggcctttacgcgacatccgagcagcgtgtctatcccaaaggcctaggagcatttgcccggctcggtcaaatctagcgcaagtttgaagcctgcggcctcgcaattttagcagcttcgttccaggccaggtgagctggagcgcggatttagaatgctttcctgctcttcgagaacttgaggttttaattttactttttacttttttttttttgacacggagccttgctctgtcgcccaggttggagtgcagtggcgatctcggctcactgcaacctccacctcccggattcaagcaattctcctgcctcagcctcctgagtagctgggactacaggctcgtgccaccacacctggctaatttttgtatttttagtagagacggggtttcaccatgttggccaaactggtctccaactcctgagctcatgatcctcctacctcagcctcccaaagtgctgggattacaagcatgagccatcgcgcccggctgagcttgaggtttttatggtcttttctgggtgactttgcagtggtcatattattactcctaggtgggggaaggtagggactgtccctcatcactgctgtgcctgcagaggactcctgacaccgggattgtcggcagggtgcaaccaagagcaaaagcacccagaagtgggggtgtgggtcaccaagtaagagaggaggcccctccataaggaaggagcaggtcaaggggcaaggggagtggtggctggggcgtttggccctgcctggcatgctcaattctgtgtgtgcacagctgtccccagccatgcatgctctccatggaagtcaggtgcagccctgtgttctctcacactgcagtcctttcagccagcctgtgaacagggcccttccccgccctgtcttcagtttctcctctctgaaggggggtgaccacccaccttgagggtggcctcccagtgaggtgagcacaccaagggtgggccattctttcctggcagactcaccaggcctggtccagccgctactcccttgttcatgcagtccatgccacctggttcctgtttgccacaccaaacaaactgaacacttctcatggtggtccccgggcctaaactgcagagagttgttacttcagctcccatggctgatggactgcaggttccacaaagcatggccttgcacctcggaggcacccaagaccacttaagtgggttacacaaatgaaaatgaggctgaaaggatgacactgaagcaggcattgaaatgccaacttttttttttttttttttttgaaacggagtcttgctctgtcgctcaggctggagtgcagtggtatgatctccactcactgcaacttctgcctcctgggttcaagcgattctcttgcctcagcctcccgagtatctgggaccacaggcacatgccaccatgccccgctaattgtttgttttttgttgtttttttgtttttgtttttgtttttttaaacagagtctcactctgttgccaggctggagtgcggtggtgtgatctcagcttactgcaacctccacctcccgggttcaagtgattctcctgcttcagcttcccaagtagctgggactacaggcacgtgccaccatgcccagctaatttttttttgtatttttagtagagacagggtttcaccatgttggccaggatggtctcttgtgatccgcctgcctcagcctcccaaagtgctgggattacaggcatgagccaccacgcctggcctgaaatgcctactttttaaaaatgagtcactttagcggggaatagtggctcatgtctatatcccagaactttgtgagtcccaggcaggcagattgcttgagtccaggagttcgagaccagcctggccaacatggtgaaaccctgtctctacaaaaaatacaaaaattagcagggcatagtgatgcacaccggtagtcccagctacttgggaggctgaggcaggaggatcgtttgagcctggaaggcggaggttgcagtgagccaagatcacaccattgagcaagaccctgtctcaaaataataaaagtaaataaaagtgagtgactttaaagaaaagattgcctttcaggcgcggtggctcacgcctgtaatcccagcactttgggaggccgaggcgggtggatcacctgaggtcaggagttcaagaccagcctggccaacacggtgaaaccccatctctactaaaaatataaaaaattagctgggcatggtggcgggcgcctgtagtcccagctactcgggagactgaggcaggagaatggcatgaacctgggaggcggagcttgcagtgagccgagatcgcgtcactgcactccagcctgggcgacagagagagactccgtctcaaaaaaaaaaaaaaaaaaaagaaaagattacgaacagtgtaggttgtaaaaattactgctgtcttacttctcctcgccctctaggagtctctgtggagtcttcttgaataagctgtgaaacatttccccacccgcttccctttcttggcccaggcttcctgaccacagcctcacctttgagcagctcagagccctgcctgccaggatgcgagccactgcctggatcgtggctctgcagggccacccatgatggaacaggtcgcctggtgaggtggtgaggcccttcatcatttcagggggtgtacagcagtactgggtaaccccgaaaatcagggatgagactgaaggatcccttccagaatgtggacacaacccctcctttgagtctcacctcctttccttcttttttttgagatggagtctcgctctgtcacccaggctggagtgcaatggaacaatctcggctcactgcaacctccgcctcccgggttcaagtgattctcctgcttcagcctcctgagtagctgggcttacaggtgtgtgccaccacacctggctaatttttgtatttttagtagagacagggtttcaccatgttggtcaggctgctctccaactcctgacctcgtgatccacctgcctcggcctcccaaagtgctgggattacaggcatgagccactgcgcccggcctctcgcctcctttctttcaagtctgaggtggctagcctggaggggtccccaggggcttgttgggcactgacgaggggacaccctgggggcccagtactccactcagacacctcccacagccttctgacagcatccttcccacagctgaccagctagaggacctcctgacccctccacttgtctgctggtgtggaaaagcctggaccctccctcttggagcctcagtttccctatctgtaaacttcggtctatcccaagctgaagaactggccagtccctgccatatgcctcactttcccctgggacacattttaatatccctttcctggccaggtgcaatggcttccccatgtaatcccagcactttgggaggccaaggtgggcagatcacttgaggtcaggagttcgagaccagcctggccaacatggtgaaaccccatctctactaaaaatacaaaaattagccaggcatggtggcgcacgtctgtggtcccagctacttgggaggctgaggtagcagaatcgtttgaacctgggaggcggaggttgcagtgagtggagatcacaccactgcactcctgcctgggagacagagtgagactgtgtctcaaaaaataataataataaaaaataaaataatatccctttcctcacaggggctattgtgtcatcttctagaaggatccgttgaggctctgaggggtgggggaacttgcttgtgggtaggaccacctgtcagaggtcagaggtcaggccaccaaggagacccagtgggatgcgccttccaaaggtgggggtacggatgggacccatgaaacctgactcctctcagactctagccaagtctaagactttggacggccaccacccagaggagaaactgagacccagagcggcacgggttggccagggtcacccagcaccagatagggactttgccagccccggggcaggaccctgtctccggccctcgaccccgctgggccgtaccctccccgttcacctcccccacccgggccgcggctgctaggagagttcagaacaaaaggcggcggggggcggggccgaggcgggccgggggtggggcggaagctataaggggcggcggcccggagcggcccagcaagcccagcagccccggggcggatggctccggccgcctggctccgcagcgcggccgcgcgcgccctcctgcccccgatgctgctgctgctgctccagccgccgccgctgctggcccgggctctgccgccggtgagtgcccgccactcgccggccgctcctcgctgagggggcgccgggcacgcgggctgggcccagcggcggatccggaccgaagggggcgccccgggtggcctccagcgcccggtacccgaaacgctttctggttccctctaggcgtgatagacagcgagcttgcagtccctgggggtgtgaaggggagccggcgccggcatcgttcgggctggtgggacgggactccacgctggactcacgcttgctcccagcgtggggacctgcctctcgcgctccagccgcgggtgctggagtgtgcgttgaaggaagcagcagagggagtggtaacagggccccctattcatcgcagggacaaagccgagcagatcccaggcaggtgtcagcctgcaggtgtgtggccgcagttagtacacctccaggtgtgcggtgggatgaaggataaagggagaagggagggcagcgctgtgctgcgggaaatggggtctaagcctggagatgtcccccgcgggcacctgccggcagcagttttgggaggcttggagccaggagaacatgagtatgaaatagtatgagtgcagtgtgtgtgtgactgagaggtggctgtcagaaagaagcggggagagaaaggaaagggagaaaatgtgtgctcaggagaggagaagaaagcccaggtaagagaggacagcagagtgaggagaggagggactgtcatggagtgtgtgtgacagcttgcatgtgtcccaaaagctgccccttccctggggcgcttccaggcaccagtcacagggcctggggccagagcctgggccactccactccacagcggaggcatccagacagctcgggcagggaagggagcaggagggtgtgacaggcaggagtctcaggactggcctggtgaggaggcaggcctggccaggctgggaccctctgtccagccactctggctctgctcagggcagccttgtcctgtgctggctatgggagcagaaagggatgggatgggtggggtagagtgaatggggggcatctcagtctggagtcttgcctccttcccagcccctcttggttcctaggacttgggacagagtcaggaatcactgtgggtagacattgaaccacaggtctggaaattggagagatctgggtttgaaccatgtgaccctgggtgaatcctgccatgcctcagaatctcacccactccatctctaatgggagtgcaggtgggagggggcaatggtgcctactgctgtgtccactgttgagcaatgaggtgatgccaggctcactagaaacactgtcacctgtagctgccactttgacgcttgtgcatggtcagtgctggagctgggggccagcttggggtggggtctgagctggactgtggtctgtcactctgcaaacacgcagggagcatgtggggtcacctctgatgtgtttatcccccggctgccttcagcaaggctgggagagctctgtaaatatttatccagcccagttcccagctttcagggttgatggaagccctgcagtccgatggatgggacgaagctaccgtccctcctggagccagcagcagaggggtgagaataggaagattaggtggaagcttgagggagaagatatccctgcttgccacctggctgtgtgagttgggcaggttgcttgacctctctgagcctgcatggtgatgctcccgtcttcctccatagcctaacaagtgccctcctcgaagtcttgcctcccaccgacatcagaaggcatagctatgattaattatacccactagaccaactgcaaactgaggcccagaaaggggcacaatgagcccagcctttcgcagtgtttcctggcaccctggggtcctcccttatctcccctctatctggtgcctcccattttctggattgcaagttgaccccagggcggggttgactccgagtctctaagctctgccaggacactgggtcagctgagaaattccttgaatgtgtctgcagctgaggtttggtgtctggcagaagagggtggggctgagtgagctaagaacccaccacagggcaggccaagggaggctactggccaagacagagggaatgcactggaagcagaaatgcttcttgggaaagtgggttttggagaaaagccaagagctggggagacagggggaagccctggaggtgggaggcatgagccccaggtctaggtccagctcttgcatgacttgctgtgtgaccccgggcaaagtccttgagctctctgggctctgtctcatcctctgggaaatgggggagctgcttcttcctcaagctccccaggggtgtagatgaggccagtggtggcctgtgtctaccacctcacctcactgaatcctgagagtcctgggaaggccaagcccacctgtctcacaagtagcaagctgcttcatgccgtgccttgtagttagggcatctggccccaggccagaaaggacttggaaagatgaagtgtgggaggacagtgaggcagaatgtgtgtcctatcccagccatggggaaactgaggccaagagctcatgggctctaaaaaaataatgggctctaaaaacaacctcactagctagaggcctcatttctagcatctcctgctcactcagtttctaagaatttaatgaacaagacagggacagggagaagagaccttgatatgtgggagaccctgcacaaggcgcttctcttttctaggcctgaaagctcccttctagctgcaacttctgttttaccatttaaagcctgaagattttgttgggtagctagaggggcggtgggtgatgggaactgtagggactggcaagggcagattcccaagcgtgggaggggagggcctacagggacaaggaacagggccaggtaagaggtgcttttctgtgccagaggctacagcaggcattacagaaggatgtcatgtagccctttgctgtggcatcattcccatttgacagataggaaagttgaggctaagagaggaaggtgacttgtctagagtctccatgtcatagaactaggccttctgaacctcagtggctggctctttttgtgacactaagactgtcatgatccaggggtttgggcatggactgggtgcctcatgagggaaggacaggaagggacagtggaaggggtgggggcatgcccgtggctctccctccatgactgtctgcaccaggactcactagagggcagaggagagaagagatttctgaccatgggcatagcagggctggcaggctgggctctgggttgtttggagctcccaggggagagcacagctctgccctttccagggagggtcttcatacccctgccaggctggggaaaggaatctgtttctcctgtaagtcaagggggcagtgtggcgaggaggaggaggcaggcccctctggcagcccacatcctccatgggagaacttggatatgtagcatctccacctgcctggtggatattggaagcccaacgaacctgcctgcaaaatgcccgggaaatagcaggcgctgaataatttgcacctcaccaaggtgaggccagcctgggtccctccttcaggggaagggtaactcaacccctgcagagcagagcagaggtagcagggagctgggtgggctgtgagcacagacagtccgctgcctgccagctgttgtctgatcaagctgcttaactcctctggggcccatttcctcatcctggaaatgagggtgatgatggtggagttggtgagaggttccatcaggggctaagagcaagtctgtggagctgttgccaaggtcctagcctgcaaccagtgctaagtacttttttttttttttttgagatggagtctcgctctgtcacccaggctggagtgctgtggcacgatctcggctcactgcaagctctgcctcccaggttcacgccattctcctgcctcagcctcccgaatagctgggactacaggagcccgccaccacgcctggctaattttttgtatttttagtagagacggggtttcaccgtgttagccaggatggtctcgatctcctgacctcatgatccgcctgcctcggcctcccaaagtgctgggattacaggcgtgagccaccaggcccggccaaccagtgctaagtacttattaacaataagcccaggccgggcgcggtggctcacgcctgtaatcccagtactttgggaggccgaggcaggtggatcatgaggtcaggagttcaagaccagcctggccaagatggataaacctcatctctactaaaaatacaaaaattagccaggcgtgaggctgggtgcggtggcgcatgcttgtaatcccagcactttgggaggccgaggcaggcggatcacaaggtcaggagatcgagaccatcctggtaacatggtgaaatcccgtttctactaaaaatacaaaaaaattagccgggcatggcagcaagtgcctgcagtcccagctactcaggaggctgagtcaggagcatggcatgaacccggaaggcggtggttgtagtgagcccagatcacaccactgcactccagcctgggcgatagagcgagactctctctcaaaaaaaaaaaaaaaaaaattaaccaggcgtggtggcaggcacctgtaaccccagctactcgggaggctgaggcagagaattgcttgaacccgggaggtggaggttgtagtgagccgagatcgcgccactgcactccagcctgggcaacagagtgagactccatctcaaaaaaacaaaacaaaaaaccaataagcccagaatcggccagaacccacaacccagtgagactgcgctgtgccaggtaaccatgcaataagcaagctcggaaatggggggaagctgcttcagggcctcacgccctaagtagttccatagcctccgtgttcagaaggccccccttcatggtggggtgttcttgatgcctcagctctgggatcaggagcagggagcgttgggacgctgatcagatccctggggtgtatggagcctgggagagctgccaaaggctgagggtgaggtggggcctgagtggctgagctcctaccccaaatatggctgtgaggaggctgcagttgcccagaccagacaggtgctgagtctctcagcaagcagcacagctccatccctctccttcagtgcaggaaggacacttggcttctgtgcggtgtccagagccaggccttagccttaggcctgagccaccagagtcctggcctggccttgccatgcccttgctgggtgactttgcagggtctccaacctctctgagcttctgcttttctcatgcacaagaactgtaacttctgccctggagacttatagacaggtagcaggatgtagcttaggtctgaatcgccatctgtggtcctggggctttggcgagtggggctgggcacctggtaattaactgtccccaccctccccgcttgaagaaggcaggcagatcacagatcagctcccactgtactcctagccctggtggggtgtgaccaaaaccacctctgctagaagccaggcctcagtggccaggtgccttcccgggtgctgggcctgtgctaggtgctgtacatacctcaccttgtccagtccacaagtcagtgtcacccccagcagtcaggttacactgactgaggccacactgcagggctacagccgctccacactggggaggaggtgggggaaatcctgggcaggagagagggcagatcctgctcacatgacagggacaggagcatgacccaggtgtgtctgaacttagcggacacaggaagaaagggagttggaagcaagtttctgtggggagcaggaggaggttgcctggtgttccttcggaggaagctttttggggtccattcctggagtgtatggctcatagccagtcccagtgtgcccccacccccagacctcattggcctaagtagctggagtaggtgacaggcagcccagggccctccacgatgtgggggacagcttgatgccttggaacaaggtgccaagaaaccagagagccagccagatgccaaagggccctgccatgtgccggtgccctttccctctccatttgcccagccacacagtgggctggggttgcacgtgtgtttgctgacaggccacatctctaactgtgggccatgtggaccttaggcctgaccagaccctcatgtcatcctcctgcctaggacgcccaccacctccatgccgagaggagggggccacagccctggcatgcagccctgcccagtagcccggcacctgcccctgccacgcaggaagccccccggcctgccagcagcctcaggcctccccgctgtggcgtgcccgacccatctgatgggctgagtgcccgcaaccgacagaagaggttcgtgctttctggcgggcgctgggagaagacggacctcacctacaggtaggggcctgggagcaggacactaggatgccacctgtgtgtccgtgggtaagccagctgccctcacagctgctgcttgagacacaggccagggtagatcttcgtgtctaacagacctgtgtgtccactgaaccccagggaggtcatctatgggcaaaccccctgaaaccccaacttagacacatacacatatggagaccctccctcagcagaggggcagagcctccgtcatcatgcaaagagtcgcagcacatgcctgcggacgggtgttcagtcactcaggcagcctttacaagagacctgtgaggaccaggctctgggactccacggtgaatgaggcagacacagccccatcctctgtgtcagtctgaggtgggtgtcagccatgtcattgtccaactctaccatcacaacttgggcttcgagcaggtggagacagtggtaagcggggagaggcaatagtgggcatctcactgggtgacctgggaggaccctgggcaggtgatggggaagctgaggctcacacatcctgcgggtggggacccagcctgaagaatgggctggtgtcacacagcattggagctgagactggggtctttagaatttcctaggtgggggcctgggaaccaacaggggctcaaggaaccaaggtgtccccacagtaagtggcactgtcaggtctaggatgggggtctcgggacccctggtcctggttctttccactgaattcagacacttgtatttgcctaagtatgagcaaaccacatacacatgtgcccatgtggccagggagaccagtgcgctgaagctgaggcccagagtacacctggcctgtgtcctgagtgttcacacacccaccaagcatccaggggcaactcctggtgcctcagccatcgggggctgtcccttccctgaggcccaggcccctccatctccctccaggatccttcggttcccatggcagttggtgcaggagcaggtgcggcagacgatggcagaggccctaaaggtatggagcgatgtgacgccactcacctttactgaggtgcacgagggccgtgctgacatcatgatcgacttcgccaggtgaatgggcggcctgggacccctccgggaacagcctcgcctgccagcagccactgaccccgcccccacccatctgtaggtactggcatggggacgacctgccgtttgatgggcctgggggcatcctggcccatgccttcttccccaagactcaccgagaaggggatgtccacttcgactatgatgagacctggactatcggggatgaccagggtatgggctggggacccattttccagatggggcaaccgaagatcataaagaatggggactcgccaaggtcactgagctggggtctggagctggatgtcctgggcaggaggttcgggggttgctgagccacctccctttttcaggcacagacctgctgcaggtggcagcccatgaatttggccacgtgctggggctgcagcacacaacagcagccaaggccctgatgtccgccttctacacctttcgctacccactgagtctcagcccagatgactgcaggggcgttcaacacctatatggccagccctggcccactgtcacctccaggaccccagccctgggcccccaggctgggatagacaccaatgagattgcaccgctggaggtgaggccctgcctgccagtccccctactcctctgctggccactgtgactgcagcatatgccctcagcatgtgtccctctctcccaccccagccagacgccccgccagatgcctgtgaggcctcctttgacgcggtctccaccatccgaggcgagctctttttcttcaaagcgggctttgtgtggcgcctccgtgggggccagctgcagcccggctacccagcattggcctctcgccactggcagggactgcccagccctgtggacgctgccttcgaggatgcccagggccacatttggttcttccaaggtgagtgggggttggggatctgctcgagagacttcccagagccaggaatgttatggccaagggcaggaacagacagatggatccttagggacacagtggatagggagagctgccccaaagcctgggggccgagggagagagagtgtggtttgttcctcaggcacaggtaggaggttctcggaggtggctcttgagataggagcagcgtggaagggattgcacggtggggcctcgtgttggtgcgttcaaccctcagccaccccatggggcggggttctagagatgaggcctctggggccccgaggcagtgaagtgactcactgtgagtgcagctgggaagaggcagggcagggaattgatccaggtctatcatcctagagctgggatttccatcctcaactggcagagatgagagcctggagcattgcagatgccagggacttcacaaatgaaggcacagcatgggaaacctgcgtgggttccagggcagtccagcctgcaggggcccagggagtggtcagtaggcatttgtcacagccaaatgccagtggaaggagcagccgcccaggcagccctctactgatgagagtaacctcacccgtgcactagtttacagagcattcactgccccagcttatcccaggcctcccgcttccctctgcgggtggggtgctgagcaggcattattggcctgcatgttttactgatgaggaaactgaggctgggagagtctgtggtaggggtcaagcaggtccacagtggcggggcatggcagtggtggctgggcaggtccttgcagccttccctctccggcaggtgctcagtactgggtgtacgacggtgaaaagccagtcctgggccccgcacccctcaccgagctgggcctggtgaggttcccggtccatgctgccttggtctggggtcccgagaagaacaagatctacttcttccgaggcagggactactggcgtttccaccccagcacccggcgtgtagacagtcccgtgccccgcagggccactgactggagaggggtgccctctgagatcgacgctgccttccaggatgctgatggtgcgttgggggtgaggcagctggtgggaggtgggcacagcagccgcttctcccacctggtggtggctgggctcccacatgcctgccacaggaagtctggctcttcatcacaggtcctttgtccagagccatctgccctcctctcggtggccggctagtgctacattccatattgcagatgaggaaactgagggtcagagaagtgcaaggtcttaccctggtttttcagccacagccagtagaacaataaactgctgtacactgagggccaacaatgctctaagctccttactggtctcatccagttctcagaacagccctctgatgtgacacctgttgtgaacccagtttccagaggagcaaacagaggctcaggcaatgaggcccctaacctggactaccctggtggtccctgctcctaaccactgacccacccagcctcccacaaccacagggggctagagccagtccagtgctccctcccctgctaggctcctcttctgtgctctttctcccacatcaggacccactgggagagctatcctagggtagcctccagctccaggactccagggtgcccgtcaatagcctggctaatttaatagatgcaggagagagtgatgtggagggtggtgggggcaacgggacttgctttcctgagaggtgggactcaggcctctgaggctctgggtacctgtcaggctgggtattagcccagcccagattccggggcaggcagaagggctccctagagggaagagaggttctgaaaggccggccctggatcctgcaggactcgaggaactcagcagtggccaagggcttcccactcagccctcccttagtgcccatccctgggcacagcctgacaggcaggagtagggcccagtgtccgctcgcccaggcttgaccaccttctcttctcaggctatgcctacttcctgcgcggccgcctctactggaagtttgaccctgtgaaggtgaaggctctggaaggcttcccccgtctcgtgggtcctgacttctttggctgtgccgagcctgccaacactttcctctgaccatggcttggatgccctcaggggtgctgacccctgccaggccacgaatatcaggctagagacccatggccatctttgtggctgtgggcaccaggcatgggactgagcccatgtctcctcagggggatggggtggggtacaaccaccatgacaactgccgggagggccacgcaggtcgtggtcacctgccagcgactgtctcagactgggcagggaggctttggcatgacttaagaggaagggcagtcttgggcccgctatgcaggtcctggcaaacctggctgccctgtctccatccctgtccctcagggtagcaccatggcaggactgggggaactggagtgtccttgctgtatccctgttgtgaggttccttccaggggctggcactgaagcaagggtgctggggccccatggccttcagccctggctgagcaactgggctgtagggcagggccacttcctgaggtcaggtcttggtaggtgcctgcatctgtctgccttctggctgacaatcctggaaatctgttctccagaatccaggccaaaaagttcacagtcaaatggggaggggtattcttcatgcaggagaccccaggccctggaggctgcaacatacctcaatcctgtcccaggccggatcctcctgaagcccttttcgcagcactgctatcctccaaagccattgtaaatgtgtgtacagtgtgtataaaccttcttcttctttttttttttttaaactgaggattgtcattaaacacagttgttttcta

SEQ ID NO: 145 - DNA, 132533 bp, Homo sapiens
atagttgctatgaatttctcctcacaaggatgggcctgtttactcaccctgggcatcgttggtagagcgctagtgtaaacagcctgaggaacccggtgggccggggaagtgggcgcgctctgttctccgcggccagctgggacgccgggccaggtggggccgcctgcgtttagcaactgctttctcaccccctggatttgcgatgtttgccacagcagcgagaagcgccattgtaatggggatgggaggggtggagcctccaagtcctgtctcaatttagatctctcactctgctgttaggcgcgcccatttcagattactaaactcgaattaagagggaaaaaaaatcagggaggaggtggcaagccacaccccacggtgcccgcgaacttccccggcagcggactgtagcccaggcagacgccgtcgagatgcagggcccaccgctcctgaccgccgcccacctcctctgcgtgtgcaccgccgcgctggccgtggctcccgggtaggaacgtgggcgcgcggggggcgcgcgggcgcgcgggcctgggccgctctgcggctctgggccagggcttcggggaggtggcggctgctgtgcagcagcgggtgggaaatgccctcgcggctgcagtccccagcctggtactggcctggaggtttgaccatatgtagcttcagcgtggctctccatgggacagttaactttctccactcatgaagttgtttaagcgtctccccggccataacaactttctgaagagagtcattttatttttagtccacattgcctctgccttttgcttctcaactttttgctcccagattgcgattcttctctcaaagacatgatatattttttctaaccaagatgtctcaaccttagcattgccaaagtgtggcggaggggactgatgtatgggttcaggggcagacattataggaagaaaacaacagcacccaataatggcaagccccattcattcctaaagatttctgtagttgagccctaacccctagttatagcagagaaagtgctgctttagtgacttcttttatgattcgctatacctggaattttcaccagttgtagtttattttcaaatggtatatttcaatcaatggtattggttaaataattttttaccctcgttgggcagctactcaaggataaaggtttgaataagaaacaggcaaaatcttagttaaaaaataacaacaacaacaagaaaataatcacgctgggataaggtcctctgtaaaggagaagcttagagacttttgctttgccaataactccattatgccccggtgcaagccatttacatcatggttccttctgtgcggttcgtggtttataaaatggaaataataacacaggccttcctctagtagtgatgcatgaattactgcattaaaattgatttatgggaattattgttgtttcagtagcatttcaattcagttgccaaatagagcagtgggcaatgttaacggaaacaactgcaattggcgcagtatggagtgcctatcgcactaggaaatctgagggtcacaaaagaaaggagatgtgaggataagaaactttgtttttcccttgttgggaactctttaggcctcggtttctggtgacagccccagggatcatcaggcccggaggaaatgtgactattggggtggagcttctggaacactgcccttcacaggtgactgtgaaggcggagctgctcaagacagcatcaaacctcactgtctctgtcctggaagcagaaggagtctttgaaaaaggtaagataaacagcataaagtcttacccttctgcagtaataactggaatatgttaataaggtcatgtgttaggtagtatagcagagaaaccccaaatttgcagtatcttacctaatatacttttaattctcact[450 bp omitted]tttgtagcagaaccaagtttggttcttgtttcaagtttgggttctgacatggcccaagattaaattgggccaatgaatgtcttctttttcagtgctaagggaaaaataattttgggaggaagaggtaaatacttaaatacttaaaacatttttcattaaaatgaacttttattgcatttttttctttttttagattcttataattatttttagagacaagctctcaccatgttgcccaggctggtctcgaactcctaagttcaagtgatccacccaccttggcctcccaaagtgctgggattacagtcctaagctactgctcctggccgagacatacatttttataatgttaagagttatttaaaaaaaaaaatttaaggcacgtaatgaagggtggttggtattcattacataagtgtttattctctacaagcgtagagaaatgaacaccatcatgaaatgaaataaaagtaaaagtttatctgcatctgtggttctttccccactggaagttcactgggtaggtatatttggaataggagtcaggaagagatggtgtgtgtaggggcaagtcacttttgtccctcatagaagcaatgtcagggaagtgggaggtcttatttccctggaggggaagtataggttagcccttaagatctgagtttgaatcctggtactactttgctactagttgtatgatcttaggtaggttacttaactgctttgagccacagtttccttgtctataaaatggaaataatgaaactgatttcccagggcagttataaagttaaaatctgtatatagtacctcttaggcatgcaataaacaacaattgctaatattattagtgtaataatactgcagaagaggatgcagaaagtccatttcctttttacatgggggcagacttcaactttcgttattggactatcatttctgaaaatgaatgacccctgatcttatgatagtcgctaaagaaaatattgaaatattaaatcacaggacataatacttaaggtagttccacattcattatttattcattaagaatttatgagtgggaagagggagggtattaaaaaaccacctattgggtaccacacttatcacctggatgatgaaataacatgtacactaaagccctatgacaggcattttacctatataacaaacctgcacgtgtatccctgaaactaaaataaaagttaaaaaaaaaagaatttataatattggctccactagtgtggcagttttcctgcaatgcagagatccagaatatatatggatgtttttgataaatatttgagctttgcttggacatttacatactctaattctagaatttcacctgttaggtcttttctgtgatctctgttatcagtctctctttttttttgcaacaaatagtacctacattggggtgcatgttgttgtggcttggttttcagctttattcttagatcttcttttgggagaagggttccttgtatgcccataggaaagttcaagtactcaagactggggcgggcaaagctgtcctgggagcagaatggatctgtgggaaggaaggagggaaaacgctgcttctttcatgggctgtttttgactctattgacatagagtttcattgaaaatgccattgctaggagcactctcctgtttcaaaggagaatgttactgtattatcagaggctgggagttattgttctcagagcagatgcttcctgtaatgtgaggacttgaggatcaagacacttctccctgcttgtcttcacatcctttgctttatctggcttctccagttgtaacaatatgtagataaaccaggacttctaaatcaggggtctggatcttcaagtatctggatgtggattcatgttttgttttttctccatcacataaacaccaaacaccaacaaataaataccttttatttttaagggacagagtctcactctgttgcccaggccagagtgcagtggtgaaatcatagctcactgcaacttggaattcttgggctcaagtgatcctgctgtctcagcctcctgaatcagctgggactacaggcaagtgccagcatgctaggtttaaaattttttttttttttgtagagatggggtcttgctatgttgcccagactggtcttgaactcctgggctcaagcgatcttcctgcctcagcctcccgaagtgctgggattatgggtatgagcctgattgtttcattttcctatgagccacccccagccccccaacagaaggttggttttaataaagatttatcttctagtaaagttgggtaaggcagtagactgtgtcttagtagcttatttccagcagttttggatttcttagaaatcctcaggatagggaggtgttttacccaaaccacaatagatttctggctcaatttgtgttggaaatagtaataactaaattgttcaaatggagaatgtatttaataaaggtgaaaaagtatggcatttcttcagggaagagttcatttgtttgtttgacagatatgggggagattttatttacatttccacttttatggccaggagtgtaggttatattactgttattcatttaaaaatacattaattctacatttattggggattgattgtagtttttttttttttttttttttttttttttgagacacagtctcactctgtcacccaggctggagtgcagtggtgcgatctcggctcactgcaacctctgcctccctggttcaagcgattctcctgcctcagccttccgagtaactgggactacaggcatgtgccaccatgcctggctaattttttgtatttttagtagagacgaggtttcactgtgttagccaggttggtcttgaactcctgacctcgtgacctgcctgcctcggcctcccaaagtgctaggattataggcgtgagccaccgtgcccagcgattatgggctttttttttttttttggtgaataatagacctttagaaaaagtatttctgctacactttgcagagttctgggaaggtgtatcaatgcctttctagtagtgagattcaaaagattgcttgtcactgttaccactgtcactgcctctaccactatcagcatcattgccatcagctccatagtgattagaactatgttcctaatcttatcttcctttgcataaagagttagttaaataaacataactggcaaaacgtagtaaaagttcagcaggtaataattaccagaggaaagaagatggcacagctattggcatttaaaatcaagtcagattactgttttgggtggagagtgagtctgtccctttgtctcttcccatattttttttctctttccttactgtgaaaggagttccttgccaaatcaagaaaaaagaaattaagaacattttgagaactgtcctctcatctgttaaggcatataaaataatttaattttcgtgatgtccttgaaaccataatttctgttttattttcccttctcttgctacaatttgacattttcatttgtaaactttcagtagttttcctgaacaagagtcacttcaagtaataaagaatataacctttctccctcattaatgaattcatcatcattagtttcatgtaaacctgatttaagaaaaaatgctagaggctgagtgcagtggctcacaaccgtaatcccagagcttgggaggctgaggtgggaggattgcttgagcccaggagtttgagaccagcctggacaacacagtgaaattctatctcaaaaacaaaaacaaaagaacccttaaaaccaaaaactcccaaaaacctaaactgaaaatgcctactgaaattttgggaactctgcatgggcgtctccaggtgagtgcctgctggtttgggggcaccattttttaaatgctgccaatcctacttccatcttcccattgagttactggggtggaatgtgctctataaatgtgtctgtaactcgctttttctttttgccctaaaatcctggagagttaatggagtgttaacctttttttaaagattttttaaaaaatctattttttcctttgttgtctttctcacattgactatgatatattttattttccatcttggctcagtaagggtgggaaatttttaaaaattgagatattagctgaaaaacttaaaaaatcatccaatttggtttggatggttttctggtggaaacaaagctcctgaacatgcatttcatgcctcgtagataaaaatcagtcccatggtctttatgaaagtagattaattagtgtagtgtgtgggcagatctcccagagcaggttttcacaggcagctttgccaacataactcagtctgaacctgcagttatgttagaattatttttaaagggtgtaggcttttcattcacacatcgtctttgttcttgtgtgtgatgtatattaacaggtaggtggtacctgagaataaaggaccacagcataatcacgatgtgcctgggctctggagcctggctacctgggcacaggtgctggccattccacttagtggttgtgtggctgtgggcagtcatgatctcactaggcttcagtttcatcatctgaaaaatagtggtttctgccttatacaattatatggatattgtgaggattaaatgaggtaacatattcaaggcacttaacacaaaggaattattcaagaaaatggtagctattgttactagaagagagtagcaacagtttatgtcaaaggcaattattaatcacctattgtgacaatcttgaaccgggaactctataaaagacacatccctaggaggggattggaagggatttaacatattaaatatccagtttcctcatagtgccaaggactttatgcactatatttaattttaacaacttgatgaagtagatactcttgtcttcattttggaggtgaggaaattgaggcaaagagagaagaattagtttttctgagttaacccagttagtaaatggtgaagcctgaatttgaagttagttgtatctgaggtccagagaccataaggttttctattgctgggaagagagtgaagtatttttatttccttgattttgggatattgatgcaatgttgcagttgtcttccactaaaatcattttcacatttgcttgcagtagatagacctggatctaatgaaatctaatttgaatcgaaagaattacaaaatgaaatgccagctctcctcttaatttactttcagcctcatagagttttggagctggaggggacctcaaagataagcaaattcaatagcctaatatatggctgggagactgaggtgaggcatgggatctggggattttcccaaggtcaaatcacttattggtggcagagctggaaacagattgcagtttcccaaatttgcagtccagtgctatttccagtatactctacgaaagtttcctaacatatggagagctgagcttaagacctaagatatatttacaaatgctgattcttctgatatggaagaaaataaggctaactaaggagtttaaaaatgcttacttgcatactgtgaaagtttcttattttagctcaaggtggagttgctctttatgcactatttgttctgtataaggggtgggggctgggttagaagcttcatagaccttttaaaaactaaattctgttgctttgtttctcagagtccaaattgtatttattaaaaaggctgattcatggcctccctcaagacatgggtaagaatcaagaatctcagctgggtgtggtggctcacgcctataatcccagcactttgggaagccaaggtaggtggatcacttgaggccagaagttcgagaccagcctggccaacatggtgaaaccccgtctctaccaaaaacacaaaaattagccaggtgtggtggtgggcgcctatagtcccagttacttgggaggctgaggcaggagaatcgcttgaacccaggaggcagaggctgcagtgagattgtaccagtgcactccagcctgggtgacagagcaagactccatctcaaaaaaaaaaaaaaaaagagaatctaacctttatgttccaccatgaccacaggtgattcttagtcacattagaatgagaacaactgccctttggtatctcacaaattgtactcgaccaaatactggaaagctcgagggtgagtagcatgcccctgcaagcctgtgatgattcatggcggcggagggaaggctcctcgtggactttcatgtttgcttttaagcaaccctcaaccctaagcgctggtgttcattttcagccgcagagaaacatgacttggggtttgattgtgaatcaacgattgggtgaagttaaaagtgaacacactgattctttaaactccaagttaaacatgtgctgctcctcttctagcactggatgagtcactgtcctagtgactcactgaaggattgtggtggaaatagaaaacagatcccataagaatttgggctgggttactgttgatcctttatgtcctgtgaagagggctttataatgctgaaactagttgtttccccacagacatttcttctcattaatgtattatttattgattatttgctgtatgtgaaacatgaatgaatggggagtggggaataagagaaaggaaggcactggaggacattcagaggtcccagaaggataatataatattaaaagtgcagaaggctagaggagtttttattttttgtataaaaaatacaatgcggtttgtaaatagtgcttcttgtatgtgagcctgtgcctggtactattatcttttacttccagagctatacagatgtccattcataaatgtcccacctctgctgacatatttggcctttggagggaacagttacttcacgtactagagacgggaagggtgtgccggaggaaagagctgctggctggtgtggcagttatgaaaaggagataggggtttgtgtatatattttctaaaaagatgtttcattctgctttggatatgagtttggggagacatccaggtggagatgtccagcagatagttttgaaattgcagctggggagagagatttaggcattattttcatagaggcagacaatattttgaagtcctggaaatacataagatgcacaagagagacagagctcatggaaagaacaagtcttttgagagaagcttggaaagaggaaaataagttaatgaagggaaaaagaccagacacagtggctcatgcctgtaatcccagcaacttgggaggctgaggtgagcagatcgcttgagctcaagagtttgaaatcagcctggacaacatattggaacctcatctctactaaaaataaaaaaaaggtagctggacgtggtgacatgtgcttgtagtcccagctactcaggaggctcaggcaggaggatttcttgagctacagttatagtgccgttgtactctagcctgggtaacaaagcatggccctgtctcaagaaaaagaaaagaaaagaaaagaaaagaaaagaatagaatagacaacgagcaatcagagaagggtaaattgaaaatgtctcagaagccaagggaagaagaagttccaagaaggaaggtttaatagttaataatcaattctctcaggtcagagaagaggaggacagaggaaagaacattggtgacgcttaagtaaatggctttaagttgaatgttggaagcaaaagcaaatttgagggaataaatggatggtgaaaaatataatcaaaatttattctttccagaagtttggtagttgaaaggagagaggtggacggtctctcaaaaggcacattagaaaggtgaaagtggttaaggcaaaggagagggtggataattcctgggttagaagtggtgagatcagtattggggcagaggcaagtggattatccttaaaaaaccctcatactttcttctttgaagaaagaaagaaatagaagagaatcattaaggaaagaaatattttgaggtatgaaattgagatgaagaataaaattgaaatacagttttaggaaaacttatttaccgacttgtaaattgcacagatctggccaccactttataggaaatgggggtaaaagttaaaagtagtggcagaccagaatgagaaacacaggactggagatcttccctggtggtgccctaaactgggtcaccgctggattgtaggaaattagaatacaggggcaggaagtcatatttgtatctgggagagctaacacagggaggagagagaagaggaaagggctgtttacgatgaagatatgcctcagttgaagctcgagaggactgggtggagttactttattactgccatggttgtcagtgaatttgtaattcactcttagtgtgggccaagatgaccaaggtgcaatgataaaacttgtctaggaggattaaagtggatcttggtcttgctctatctctttcactcttcacttacctcggagaattctatgaggagactttcttccgttgcaaggctcagggtgaaattggtcaaagatttggtggagggggtagcagtaggtaggtagatgacaggtctataggttgttagttctgaagaaacgattcataaattaaaatccgaaaaccagactggtaaagagcttggaaataaatgaagaggaaaatttttaaagaacacctagtagctcccttttggcagggctgtgttaggaatttacatttatgaaaatatagctggcagaaatgatttagtattacaaacttaagtttcactgcaatatatgttaaagctcctcaggaatatagataagacagggaatttattattctgagcaattcaaatttattcagcaccaaattgcctatggcacaatgctgggtgacataaatatttggtgaccacatgaggttcctgtgcctgtgctcttcgcagggaagcagagtaggcttcatttgatgtgtcctcccacgttgattatagaggcttgttcgggtgccgtgttgacagtttcaaagtcaagcgtgggtttactggactagagaactggatgaattagctgtgtctgccatggccatgggagttggggagtgtggtatgaatgctgcgaaggattctgtagcccatccataaactttatttatggatcagttgaagaggaatggtctaagaggaacggttatctacgtagctacataggggcttgaggtagtaacaacatggataagagagaacagacgaaagagtgggtgtatccaaatagtaaatgagagtggagtaagctacagaggaggaacaaggagggaagggatatgaggttatgtttgcactactgttttggaaggaatagctgggtctgtcctgcactgtttgggaggcacagtgggttagaatgggtgctcaggaaccacactgaaattgaaccctagcatcacctaatagtagtacccacctcgtagcattgttgagaggattaaatgagataatacttaagagctgtatcatccaatatggtagctactaaccacatgtggtttttgagcacttgaaatgtggctcatacaaattgagatgtgccaggagtataaaatacataatggattttgaatacttagttccaagaaatgcaataaaacttatgattttaaaataatgatttcatgttcaatgttaatattttggacatattgagttaaataaaatatgttattaaaagtaatgtcacccaattttttctttttttggcacataaaagacacctaatttaataaatattagttattattttctcttttattatgcagttaagaactttgatttaaaattgttatctttatatatatatatatatatatatatatatatatatatatatatatatttattatactttatgtcctagggtacatgtgcacaacatgcaggtttgttacatatgtatacatgtgccatgttggtgtgctgcacccattaacgcgtcacttacattaggtgtatctcctaatactatcccttcccccttcccccatcccacgacaggccccggtgtgtgatgttccccgtcctgtgtccaagtgttctcattgttcaattcccacctatgagtgagaacatgcggtgtttggttttttgtccttgcgatagtttgctgagaatgatggtttccagcttcatccatgtccctacaaaggacatgaactcatcattttttatggctgcattgtattccatggtgtatatgtgccacaatttcttaatccagtctgttgttgttggacatttgggttggttccaagtctttgctattgtgaataatgcctcaataaacatacgtgtgcatgtgtctttatagcagcatgatttatagtcctttgggtatatacccagtaatgggatggctgggtcaaatggtatttctagttatagatccctgaggaatcaccaccctgtcttccacaatggttgaactagtttacagtcccaccaacagtgtaaaagtgttcctatttctccacatcctctccagtacctgttgtttcctgactttttaatgatcgccattctaactggtgtgagatggtatctcattgtggttttgatttgcatttctctgatggccagtgatgatgagcatttttccatgtgttttttggctgcacaaatgtcttcttttgagaagtgtgtgttcatatcctttgcccacttgttgatggggttgtttgttttttttcttgtaaatttgtttgacttctttgtagattctggatattagccctttgtcagatgagtaggttgcaaaaatgttctcccattctgtaggctgcctgttcactctgatggtagtttcttttgctgtgcagaagctctttagtttaattagatcccatttgtcaattttggcttttgttgctattgcttttggtgttttagacatgaagtccttccccatgcctgtgtcctgaatggtattgcctaggttttcttctagggtttttatggttttaggtctaacatttaagtctttaatccatcttgaattaatttttgtataaggtgtaaggaagggatccagtttcagctttctacatatggctagccagttttcccagcaccatttattaaatagggaatcctttccccatttcttgtttgtgtcaggtttgtcaaagatcagatagttgtagatgtgtggcattatttctgagggctctattgtgttccattggtctatatctctgttttggtaccagtaccatgctgttttggttactgtagcctcgtagtatagtttgaagtcaggtagcatgatgcctccagctttgttcttttggcttaggattgacttggcaatgtgagttgttttttggttccgtatgaactttaaagtagttttttccagttctgtgaagaaagtcattggtagcttgatggggatggcattgaatctataaattaccttgggcagtatggccattttcctgataccaaagcctggcagagacacaacaaaaaaagagaattttaggccaatatccctgatgaacatcgatgcaaaaatcttcaataaaataccggcaaaccaaatccagcagcacatcaaaaagcttatccaccatgatcaagtgggcttcatccctgggatgcaaggctggttcaacatatgaaaatcaataaacgtaatccagcatataaacagaaccaaagacaaaaaccacatgattatctcaacagatgcagaaaaggcctttgacaaaattcaacagcgcttcatgctaaaaactctcaataaattaggtattgatgggacatatctaaaaataataagagctattcatgacaaacccacagccaatatcatactgaatgggcaaaaactggaagcattccctttgaaaactggcacaagacagggatgtcctctctcaccactcctattcaacatagtgttggaggttctggctagggcaatcaggcaggagaaagaaataaaaggtattcaattaggaaaagaggaagtcaaattgtccctgtttgtagatgacatgattgtatatctagaaaaccccattgtctcagcccaaaatctccttaagctgataagcaacttcagcaaagtctcaggatacaaaatcaatgtgcaaaaatcaccagcattcttatacaccaataacagacaaacagagagccaaatcatgagtgaactcccattcacaattgcttcaaagagaataaaatacctaggaatccaacttacaagggatgtgaaggacctcttcaaggagaactacaaaccactgctcaacgaaataaaggaggacacaaacaaatggaagaacattccatgctcatgggtaggaagaatcaatatcttgaaaatggccatactgcccaattttttctattttttttttagtgcacatctttaaaacatttatcacaatgcttggtacatagaagacaccgagggaatgttaactatgttgtacctggtgtttctcagtatcagatattaatactgatgcctgaccacaagcctgtggcatgagtccaagtctccctgctgatgactcattttggcttaggtagatcttcacccttatcccttatcccttgaggaagaagaaaatctccctaaagagagccacaggggtcggcaaaatttctgtaaagggccagatgttaagcatgtaggttttgccaaccttcaggtctttattacagctgctcaactctgcctttatagctcggaagcagctgtagacggttcataaacaaaagagcatggttgtgtaccagcagaactttatttatggatgctgaaattttgagttcatataatttttacttatcatgaaatattcttcttcttttgatattccccccagctatttagaaatgcaaacccattcttagttcatgaactgtacaaaaaacaggcgtgggccagactggatctgtaggctgtggattgctgaccctgccattaaaaatgccctgtacatttagcagccaagaaccttgcttgactctgggtttttcatttgtacttaacctaacatttgctttatagtgtaccattttatttattttacttttagtaggtttgtgtttgacctgcttttttttttactcaatgtttgtgtttaacctgcttttttttagacaatggaacaaaactttgtttatgaaactcaaatttattaagatatttgtaagcaaagggaaataagagagaaaaatataaaaggagtatgtaagggaccaaaggagattttttgtttggttttgttctgctcagaatacttgtgttttctgtgtagactgaatttacccaatagtttttttgccttaaagtgacattaaactgtgaagcagaaacattgtatttttaaaatcgtactttaagtttttttttttttttttgagacggagtctcgctctgtcgcccaggctggagtgcagtggcgggatctcggctcactgcaagctccgcctcccgggttcacgccattctcctgcctcagcctcccaagtagctgggactacaggcgcccgccactacgcccggctaattttttttttgtatttttagtagagacggggtttcaccgttttagccgggatggtctcgatctcttgacctcgtgatccgcccgcctcggcctcccaaagtgctgggattacaggcgtgagccaccgcgcccggcctaagtttttaaaatattttatttttatagatttagggggtacatgtgcagttttcttacatggatattttgggtagtggtggagtctgggcttttagtataaacatcagccaaatagtgtatgttgtatccattaagtcatttcttatcccttacctccctgccatatgaatctccaatgtctattatttcactctctaaaaaatattgtattttatacaaaaattagccgggtatggtggcgcatgcctctaatcccagctactggggggctgaggcaggaggattgcttgaacctggaaagcggaggttgtagtgagccgagatcatgccactgcactccagcctgggcaacgaagcgagactccgtctcaaaaaaaaaaaaattgtattttaaagttttgttttccatgaatttgtggggggaaaacccttatttcttaccttatctgttgatcaaagaaactgctgaagaatgaggaaaaaaatttagtaacttgataaagagatcaaaattttcagctaaaaaagtgataataaatttattattgcataagactgagtagcaaaaggctgccaaaaataattaagcagcaaacactaagtcaggcatatatatatatctagtggaaaatccactttttttttcatagagagtatttctgtacctagttggatttccggttacacactactccttcccttcaatgattttccaaagttatttggtgaggacagatgtcagaagaggcagcatataatggtattacagagtatgtttaaaaagttaaggaaaggttagtttttgtgtatgcttattacacaatttaaaaatagctttgactctatttgtaaatcaaatggccagttctcaggctgtgccaaatgcgaagccttcaaacaaggtttcttctgagttgcttaagcagccctgggaaggagaaagcatctgaaagggttttcagattgattgtctctggttatacacagaaatgattggagttttataaagttatctataaaaacactaagaagaaccttacataacagagtgtgtctttagttagtgatttaaaagagtgccatactgggtttcaagaggtggtgaccatttcccgtgtctgaatggagcctcgccaaaagggagaaaaatgttcacaacagtttgcaaatactatctatttaattctcaacctagcaacagcagagaaagagattattattcctctctcatctatgctgcccccactctcctccccgctgcccccgattttatgttttggttgtgtaaattattgctaaatgaatagaactttcaaataagtcctatgctaggacttcataagtgcctaggaaattccaagctgtatttgtaaatttaaagggaagatcagcagaaaaaaatgtcaagtacttaaaatcgactttttattaaggacgcatgagaccagtgagtaggccttagattggatgtgtccacatatcctctgagtcgctccctggatccagcaagaaataggggtgggtgggacatctttgtccctacaccatagcgttggggaagagtctttgtattttgtatttttattttttttttaatagagatggggtcacacgatgttgcccaggctggtcttgaactccttgcctcaagggatccttctgcctcagccctcccaaagtgctggtattataggcgtgagctgccacacctggcctgggtaggacttctgtttctagctctgtatctttcttgcatctgtgaacagataaggtcatgtgtctgagcagtaggacccaggcatgcagttgaactgctcgtccaacttctctctggtgagagaattcctcaaagatttgacttcattcagagctgcattaaaaacaaaagacaaaacaaaaaacacttctactatgaaatgagatttcctgcacttcaaatctgtttagcttgttttgaagtgccagaatgcttggcctccaattagtcaatctccgagagcctcatttggattgtagactcccaactgtttttttactttctccttgctgatgtcattggataaaaataaattaccacccctcccccgtcgttcttcatctttgtaaatttgctgccggtgggtggtagctggtatcagaccagggcaggaaggaagcacattgcttcctccagttatggagctagcataatagtcaacccctgatgatttatcttaatacaatgaaaaataagtaactctcaataatggagggtgctggtttgttggggcgaagctcactgcagtttgtttctattttattccaatgtgggacattgtggtggatgctgtgttttagggcccagatcgctctttagggatgaaggactttttcccgaaagctgctaggagtgttgtgcccgactgccttcagagccagttgtctctgatgatcgtatcagctagagaattgccttgcccatggtggcctccctcctggggatggcctgtattatgtgactgattgacgtggggtatgaaggtctggccctttcgccccagttcaggacaactctcactggccctgactgcttctgagctgccctggtggatgcctctttggagcctgcattgcagccccactgctctctcccctagtgcagtttccccctttcccttctgcaggtgctgatccaccgaatactccttagtaaacctcctgcattgtaattaccgtctcagagttggctactgtttaactttcctttgaagaggaatgtttcagatcttggaatcaacttcaaacatgtcaaaactgtgtagtgtgaagaattgacatgagttgggaaagtctttcgtttttatatccttttcagagttcttgtatgacacaaaatattttagagttagctccgctactgcagtgcttggagtataactctaagtttcttctaagagaaacttcatggaagaagaatccacaggttttggtgagtgataaacttagagttgaggagagaaaagagttcaagatgattgagattttgaacatccatgattgaggaagtggtgatagcaacatatacaaacaggctatacaggcagtggaacttttactataatcaaagatatgtataatgaaaacaatggtgaggcacaaggctgggtccagtggctcacgcctgtaatcccagcactttgggaggctgaggcgggcagatcacttgaggtcaggagttcgagaccagcctggccaacatggcacaaccctgtctctactaaaaacacaaaaaattagccagctgtgatggtgcttgcctgtagtcccagctacatgggaggctgaggcatgagaatctcttgaacccgggaggtggaggttgcagtgagctgagatcgtgccactgcactccagcctgggtgacagagcaagactctgtctcaaaaacaaacaaaaaaccagtgatgaggcacggtgactcacatctgtaatcctagggccttgggaagtcaaggtgggaggatcactcgagcctaggagtttgagagcagcctgggcaacataatgagcccccatttctacaaaaaagtaaaaaaaattagccaggcatggtggcctgtgcttgtagtcctagttactggggaggctgaggcaggaagatcgcttgagtccaggagtttggggtggcagtgagctatgattgcaccactgtactccagcctgggtgacagagtgagaccctgtctccaaaaaaaaaaaaaaaaaaggtatgtataataaaaccaactatacaactgattctttttttaatttttaattgttgtggatacatagaagatgtatatatttacagggtacatgagatactttgaaacaggcatgcaatgtcaacaaccacatcatagtaactggggtatccgttccctcaagcatttgtcctttgtgttacaaacaatccagttatactattttagttatttaaaaatgtacaatcaaattgttattgactacagtcctcctgttgtgctatcaaatactaggtcttattcatttttctaactattttttgtgcccattaaccatcctcacttgctccctaacccttcactactctccctagcctctggtaaccatccttctacactcttatctccattattagttaaattgttttaatttttagctaccacaaataagtgagaacatgcaaagtttgtctttctgtgtttgggttatttcacttaacataatgaccttcagttccatccatgttgttgcaaatgacaggatctcattcatttttatggctgagtagtacttaattgtgtacatgtaccacattttctttatccattcatttgttgatggacacttaggttgcttccaaatcttagctattatgaacagtggtgtaacaaacatgggagtgcagatagctctttgatatactgatttcctttcttttgggtatatactcagcagtgggattgctagattgtatggtagctctatttttagttttatgaggaacctccaaactgttctccatagtggttgtgctaattttcatttccatcaacagtgtatgagggttccctttcctccacatcctcatcagcatttgttactgcctgtcttttggataaaagccattttaactggggcgagatgatatctcattgtagttttgatttgcatttctctaatgatcaatggtgttgagagggccttttcatatacctgtttgccatttgtatgtcttctttcgagaaatgtctattcagatcgttttcccatttttaattggattattagattttttcctgtagagttatttgagttccttatgtgttttggttattaatcccttgtgagatgagtagttacaaagattttctctcattctgagttgtatcttcattttgttgattgtttcctttattgcgcagaagctttttaacttgacgtgatcccatttgtcgatttttgctttggttgcctgtgcttgtgggatattgctcaagaaatctttgcccagttcagtgtcctggagagtccctccaaagttttcttttagtagtttcacagttttaggttttaggtttaagtctttaatccattttgatttgattttagtgtatggtgagagacagggtctagtttcattcttctgcatatgtacatccagatttcctagcaccatttattgaagagactatcttttcctcaatatatgttcttggcacctttgtcaaaaatgagttcactgtaggtgtatggatttgtttctggcttctctattgtgttccattggtcgtgtgtctgtttttatgccaatatcatactgttttggttactatagctctgtagcataatttgaagtcaggtaatgtgattcctcctttttttttttctttctcagtatggctttggctattctgggtctttggtggttccataaaaattttaggattttttttctatttctgtgaagaatgccattggtattttgatagagattgcattaaatctatagattgctttaggcagcatggacattttaacaatattgataatttcaatccgtgaacatggaatatcttttcatttttttggtgtcatcttcaatttttttcatcagtgttttatacttttcattgtacagatttttcacttctttgatcaagttaatgcctgggtatttaactttatttgctgctattgtaaatgggattactttcttgatttctttttcagattgttcactgctggcatatagaaattctactgattcttttttttttttttttttttttttttgagatggagtctcgctctgtcacccaggctggagtgcagtggcgcaatctcggctcactgcaaactccgcctcccgggttcagggcattctcctacctcagacttccaagtagctgggactacaggcgcctgcaaccacgcccggctaattttttgtatttttagtagagacggggtttcaccgtgttaaccaggacggtctcgatctcctgacctcgtgatccgcccacctcggcctcccaaagtgctgggattacaggcgtgagccaccgcgcctggcttctactgattcttgtatgttgattttgtatcctgcaactagactgagtttatcagttctaatcgtgttttggtggcatctttaggtttttccaaatataagatcatattggctgggcgtggtgactcatgcctgtaatcccagcactttgggaggtggaggagggccagatcacttgagcctgggagtctgagaccagcctgggcaacatagggagaccctgtgtctatttatctttaaaaagtaaattaattaaaaatattatatcatctgcgaacaaaaataatttgacttcttcctttccaatttgcctgcccttcatttctttctcttgtctgattgccctagctaggacttccagtactatgttgagtaacagtggtgaaagtgggcattcttgtcgtcttcctgatcttagaggaaaggctttcagtttttccccatttagtatcatactagctgtgggtctgtcatatatggctttttttatgttgaggtgtgttccttctatatgcagtttttttgagggtttttatcatgaagaggtgctgaattttatcaaatttttttaaattatcaattgaaatgatcatgtagtttttgcccttcattctgttgatatgatgtatcacattgattgatgtgcatacaactttttttttttttatattcagagtcagtgcagagcagtggtttagagctcaggcccatgagtcaggtggttagggtcagaagcttggccccactactttttgtctgtgtgaccctgggaaagtcatttcacatgtctatgtctcagtgttctcatttgtaaaataagggtaataatacttaatagtattgttgtgagctttaaactcaatgtatgtaatgctttagaacactctgtaagtggtatgtactattattattattttattcatataactaaaaaattgtattctgtctgatctgttggttgtttcattgttgctaaacacaaatttaagtcttctatccccgtgaccagttctgtccaatacaagtataagtcaactacataagttattggcaattttctagtagccgcactaaaaaagaaagagaaacaggtgaaattaattgtaataatatattttatttaacccaataatttacaagtattattagttcagcatttaatcactataaaattattgacatgacattttacatttttttggttgtaagtctcagaaatatggggtgtattttacacttgctgcttatttcagtggctcaatagccacatgtatttagaggctcctgtatgtgactgagcagctttaaagagttgctagttaatcttgctcatttctgaagtgttccagtcaactgttgctgtgaaataagccgcccccagatttagtagattaaaacaacaatggtttattatttctcacaattctcatttagcctatacatgctagattgatgattattgccattatttttgtgatagttgtgaattccatgatagtttttgaattccacgattccttctacatttattagttggaattctgtggtaaggaataactctttcttctctttcactcagtcatatatttaattgtacatcagcatgaactcatagattcttgttgtattcagtaggttgtaacccattatttattttattattcaagtgatctgaccataatattttaaattaagaaaacaccctctccacacatgctcaggtacctgatgagatcagaacaaattctgctacatggatggtattctcaattccatcccccaacacccccgtattgcaatgtttaaatgtttcagcccaaatatttcacagggtctgcttgcagagccccatgcttctcttcaacaaatgtttttacaggacaaaatttgtccagtaaattgtctctatttatggttcctttgaaagttttaccaagtttacttgctgaaatatcctagggcttttcaatttcacttcaattcagtatagaatataataagtctttcccattaaaagtaagcttaatgaacagaagtttcttcctacaaggtaagatactcccaaagtataactggtgtatatccaaagatatgaaatcagtatgttgaagagatagctgcacccccacatccactgcagcattattcccaatatctaagatatggaatcgatgtcagtgtccatcaatggataaatggataaagaaagtgtggtatatatacgtaatggaacactattcagccattttttttaacaaaaaaaatgtaaaaagaaggaggtcttgtcattttcagtgacatggatgaacttggaggacattatgttaagtgaaataagccaagcacagaaaaacaaatattgcatgatctcacttatatgtggaaggtaaaaaaagatgaactcatagaaacaaagggtaaaatggcagttaccagaagtgaaaggaatggggagatgttggtcaatagacacaaaatttcagttatacgggaggaataatttcaagagatctagtgtacagcatggtgactatggttaatatcaacatattgtatacttaaaaattgcttagagtagattttaattgttcctttccacaagtagttatgtgaggtaaggcacatgttaaatagtgtggtttagccattccataagttatacctcattccataaggtatacatctatcatctatatgtcgcataccataaatatattcaattattacttgtcaattaaaaaaagaataaaacattttcagagttaatttatgtgcacattaaacccatcctagaataatattttgctaaccaaaaaaagatccaggacaaatgctaaatcaggatgctggaataacagcgtcaactgggataatcctggtgaggcctcatcttgtccaaagacccccttttgattgggccaggcctcctggctactgctgtctttctggctgtggtctttgctcacccagctctttggtttggtagactcaggttgatctccactgctttgcatttgctgctcttttgcctgtaacattgtacccctccttgctcatatggctaatttctccatatcctacaaccttagacactggcatcgttttctctaggtgccttcccttcatccctccaatgtgctccttgtcctacctgtactatgtatatctgttccacgatacttccttcttcacctttttgaaacaccatgttcaatatcctgttatttaagagtcttgctctttgcttcctatgataacagttattagaggaactgatctgtgctaggtggtaagtgatggtgatgaattacttatctgttcctgaaaacatacttgtatttcatggaggcccactggggtggtagtcttcaaagtgagtgtgcacacgtctaagagtatatgagaccatttataaggatggaagtagaaaatgtagtaatttttatttcttttttttttttttttgagacagtatctccctctgtagcccaggctggagtgcagtggcacgatcttggctcgctgcaagctctgcctcctgggttcacaccattctcctgcctcagcctcccgagtagctaggactacaggcgcctgccaccacacccggctaatttttggtatttttagtagagatggggtttcaccatgttagccaggatggtctcaatctcctgacctcatgatccacccgcctcggcctcccaaagtgctgggattacaggcatgagccacccacgcccggccagtaatttttatttctattattttattaagcaaagctaagaagttaaagtgtttctctttttctttttattgatttatttatttatttttgagacagagtcttgctctgttgcccaggctgtagtgcagtgatgtgatctcagctcactgcaacctccacctcctgggttcaagcaatcctccttcctcagcttcccaagtagctgggactacaggcgtgccactatgcctggctaatttttgtagtttttagtggagatggggttttgccatgttggccaggctggtctctaactcctgacttcaggtgttctgtctgcctcagtctcccaaagtgctgggattataggtgtgagccactgtgcctggctataaagtttttctaatgtttaatattttggttgagaaaatacatgtatataattttataaatctaatttgacattggtaaggtatactaagtatttttattgatggagtactctatcataaaaatttgaagactacgtctataggggcatatgacatcctcaatggaaaactcttcaagctttttgacactataatagctaacatatttcaagtgttttctatgtgtcacgcactgttctatatgctttacaggtatcaacatacgtattccttataaccacctcatgagattgatatgattattagcatcctcatcttatggatgaaaaaaattgagctagagaatcaggtaatttgttcaaggacagggccagtacatatcaaattcttgatgtggtctgattccagatgctgctagcttaacccctgctgtgtactgtgctgtgctctggtgcctctgctctcacatgatagacccatttggcttcctggaggagagggaccacatctgtcttgcacattgtgctagtttttacggggcctattatttccttctctctctttaaaatcatcttttgctccattttatttcccaagggcctgccatcttcgataggaactttggacaagttctcttttatttttaacatgaaaccatttttccccttgaaataaatggatctgatgagaaattggcatgagtttaattagcagtcctatgtatagaaactttacacgaaaaaagtctgcatcaccccagtactcacgagtcagttatgagtcccagctcacccctgacatgactaatgccttcctttcttcctttatcacgagggtatgaggacaagaaataaacctcagactacttctgtacagcgtgtgaagtgtcccgcaagcacgtataaccttaaaatagcaacaagggcagcagcaacaacgacaacaaaaatgataatggcaaagagaagcagaacctaatgttttttgggtttgcccactgatacccttttaatcctgatttttaattgtttggcacaaagatatgtaataatttcttgggtcttctgggcatttaaatgtcattttggtttcaccaaatgtatttatgattccacctacacatgtaagagtattgggagagttttggaaggtttgtattctatcatcatattcaaattgtgctaactctgttttctttcctgttttccttgtaggctcttttaagacacttactcttccatcagtaagtatccatttaaaaaatttggtttcagaaatatattgtatcagtgaactaaataaattaatattttattggattttatgtcaattcacacatttcacgtttcatgtaagtttggcttgagtttagttcagccttcagattatttatgaataatattatttcaaggagattgattatgaggctcttcaaactcttggcagagattttcctcttgtaaaatagaagacttcactgaaggaaactggcctggactattagcacagaaatctggactggtcataaaaaggaacgagaccatgtcctttgcaggaacatggatggagctggaggccattatctttagcaaactaaaataggaacagaaaactaaacaccacatgttctcacttataagtgggagctgaatgatgagaacacatggacacatagaggggaacaacacacactggggcctactggagggtagagggagggaggagggagaggagcaggaaaaatagctaatgggttctaggtttagcaactgggtgatgaaataatctgtgcgacaacccccatgacacaagtttacctatgtaacaaacctgcacttgtacccctgaacttaaaataaaagttaaaaaaaaacaaggcatctgggctggtttgctcctgcttctgtcgtaatgagccttctagtgtggaactctgctcctcagtttccttgtgcttgaaaagagcagtgccatgctgagacatactagaacttgaggcaaaaggaaaaatcagtaatattgaccctgtctttgtttaaaacttcgacttctttgtttataattttttgcattaattttgatattttaaaatattgtattaaaatattattttcttgattgctaaattttttggtacccccttaaattttgcaccttagacaagtgcctcactcacctcaccatagccctggccttggaaaagagaatgaagataccatctttatctcacagcatgtcctggagtgaaatgagatgtggaagtgttgtagcacttgctatagaaatggaaaggagttattattttgttgagagattcataaaaccttattattaaatgtttgtggatgaatcttcctatagctttgatttggaagtttatactttcattactatgctttgttttggggctttacatgcttaatgtacagtatagtaaaccacagcatccaacatcaggtgcagtttgatatatgtacttttctgagaacagaggactaatgacttaggccctgacacactgtatacctgattagtatcagcattacctcataagccaggttcgctcattaccttaaatttttttttttttttttttgagacaggtcttggtctgttgcccgggctggagttcagtggcacaatcatggctcactgcagcctcaatctcccaggttcaagcaatcttctcacctcagcctcccgactactggcatgtgccaccatgcctggctgattttttattttttgtagaaacaggtttccctatgttgcccaggcttgtctcaaactcctgggcccaagcatccctcctgccttggtcccccaaagtgctgggattacaggagtgaaccaccatgcctggcccacttagtaccttttgaaagttacttgtcaagtacattcagaaaccacatttattttggggggttcatagagaatattatactctcaaacaatactttataaaaattacttagtatgctatatctattctgtttgttacatattatatttgtactttctttcctaagaaatatactgctgctaataatagaaagtggaagaaaaaaggcataagcaggcagaagtgggggaaaaaaaccctgcaatctttgtggcaataaaacattagattgcattaaaataacctaaaacattagatactggccccagtgcctgggcgcagaactttgttgaaagggtattccagtggtaagatgaaaataaatcctgtgtcgtatatttgccctatagcagaaggagggtggggtttaagctcaggaatcacagcctaaagcacaataattgtctggtttcctcaaaggagtttgcagtttcacataccggaagtgtagaaaggctgaaaggagaaggcggggcaagggcatgagagtttctttcaatgatactagtataaactgtacgtgtctgagctaatattaactagaaatttgtctactacacttctttttttttttttttttttttgagacagagtttctctcttgttgcccaggctggagagcagtggcgcgatctcggctcactgcaacctccgtttcccggattcaagagattctcctgcctcagcctcccgagtagctgggattacaggcatgcaccaccatgcccagctaatttttttttgtatttttagtagggacagagtttcgccatgttggtctggctggtcttgaacttccaacctcaagtaatccgcctgcctcggcctcccaaagtcctgggattacaggcgcaagccactgcgcccagcctactatacttcttttaagtcttaagtatatgaaatactaactctgacatccagtatttgtctttaatattatgtcatttcaattgtatataaatatagctattatctattgaaagctttattagagattatattttggagtgtatctctttttagtaaagcacagtatgaaagacttagaaataaagtgtatggacaaatttgataatgcttgacaaaaaaagaaggctctgcattttaatgagttttcaattaaagcagaaccaactttctttttccccagtgagaacatacctgtgaatagaaccaccttttaaagtgcacttgcattctgacacttgtaagtgtaatattttaaattatttttcaggtctttatggctttttagtgtaaaatataaatatttcaagaatgtgttaacacaaatgtgttttttatttctgatttactcattgtacttcaagacactaaaataacccccaatatgaagtaaataaaaaacataaattgagacaatataaatattgttttgtacacaatatggcagaaaaacttcttttgttctctttgtcaaatgaaggagtggttttatttgattagaaatgtttttaatgtgtaagtataattactaatatatttttaatggaaactatcatcttagatttctcaattttattttgaaaaattgtctccgttatgtttggtaactggcattattcctgaagtatatgaggataaatactattgtgttgtctcagtttccttacagcagtgaatctttcagagaaggtgaaatggctttagacagcccagattagaataagtaatccttatttattgtctagcaagaatgtttttgaatgtgcttaccttatgtatcctaggcagagagctatcatctcctcagagagtttgcatttatgtatacacgaaatagatgtgcctaagtgagagtcaacatagccaatccagaggctgattgatattctgttggtcaaagctttgggatattgtcaattcccagactcttgtcctgctttcagacagcctctcactgtgggaactgcaccttcctccagccctgtgccctctggtcaaggagtccaaaatctctgtgggtaaataattgactcctgtttaagagccatggaagtcacttatcaaggaacagctttttttccccctttcccccaccaatttcgggaacctttttcagtaactgtggccccaagacggcagaaggcaatttaccagtaaagatgcaggagcttctgttacctcatagtgtccactctgctgtgggcaggttataacccactccagatctggcacagagagagaaacttttataaaaattgcttaaagtcaataatcttttcttcagtctcattatgcgcccccattgttaaccatggagcaccgaggtctgcattgacaccacaagactctggagcaccacccagagtacgtggtgacaccccgagacatgtggtgatgccccatgcttcatacaggcacccaggtctaatgattcaccaaggcccatattgtcatctctgggtggcttgccctgggactaacactgagtctttgaggatcccaaattacctaaattttatatatggcaaggtggggtttttaacggggaaaagttaaaaaagcaaattagttaaggtaacccaaaggaacaggaagatagtcagtaatgtttcccctgagtcagtgtcagctccctgaaggaggatagagtaggaggtagaataaaatgttttcgggcatatttgcatttattttaattctctgaccctttaggctgcttgtggttaataggcttctttagctctaggcctctgtgtcattaatttgacatcagtcttcaatctagcatctgttctggggcctctgtgccactaaaaatgataaacatatcaaatcaggaagagcaatcccatcaaatatatttttaaacatgaaatatttagaaatcgatgccatttataagcatataatattctggttcctggtgtatatattttcttgtttatagtattaggaaatctgattcaaagagtctgaggactgaagtatcacttgagaaaatagaatttaagattgcaagttccaggctagactctgctctaccagggcacaggtctttggttcatgttgtatcccaagtacctagggcgtcctggtacacaaagggtgctcaataaatacttctttaggctgggcgcagtggctcacatgtataatcccatcactttgggaggccgaggtgggtggatcacttgagttcaggaattcgaaaccagcctggccaacatggtaaaaccttttctctactaaaaatacaaaaattagctaggcatggtggcgcacacctgtagtcccagctacttgggaggctgaggcaggagaatcgcttgaacccaagaggtggggttgagattgggccactgcactccagcctgggcaacagagcaagagttcgtctcaaaacaaaacaaaacaaaacaaaacacttctttattgaataaaagcaaaaattgacaccagaagtcatttgaaggtgacatactgattgtttttcctaacattttattattaacttttcaaatatacaaaaaacttgaaaatgtttcataatgaacactcctatacttgccacttagggtctaccattaacattttactatacttgctctatcatacatctatccatctacccatctttctatccatccattagttcatcttatttttaaatgtatttccaagtaaattgcagacatcaatactcttctccctaaatattgctgctgaccattttattgttgacagtggtttcttgcactttcttcatattcttaaccacattgatagcattctgatgtctgctattattggaaaatcccctttgagctatctgtagacaaaacttatttgcaaaaatgagtcaggatatagtttcgggacctcagttttaatatgaaaatcaactaaaagtcaagcatgctagttatctattgctaagtaactctaaaactttgcttcaaacaataataaattaaacttttattacttctcacagtctttgtgggtgaagaattgggaacaatatggttgggcatttctgatttggagtctcacgaggttgcaatcaagatatcagctagggctgcagtcatctgaaggcttcatcagggctaacacattctgtgaggcagctcattcactaggctgacacgtggttgttggtggttggtgggaggccctggttcctcccaatgtgggcctctccacagacttctttagtgtccttaccacaccactctggcttcctccagagtgagtgatccaagcgagaaagagagacaacagggaagaaggtattctttttctgacatagcctaattctaggatttggaaggaaatcactaagtctggggaattaggcttcaccttttgaagggactaaagtcagagaatttttggacatattttaaaattaccacatcaaagtgtgtgtgtgtgtgtgtgtgtgtagtgtgtgtgtctgaaatgattttaataagaatatccacctgagggattgttgtgaattaaaatgatatagtgcaggtaaactgctcagtatggctctggtctgctaatgctagaaggtaggacttctattgttattattattattattattattattattattattattattattttgagacaaattctcgctctgttgcccaggctggagtgcagtggcacgatctcggctcactgcaacctccatgttcaagcgattctcctgcctcagcctcccggagtagctgggactacaggcgcatgccaccacacctgggtgatttttgtagttttagtagagatggggtttcaccatgttggccaggctggtctcaaactcctgacctcaggtgatctgcctgccttggtctcccaaagtgctgggattacaggtgtgagttaacgtgcctgggaaggatttctgttattaatagtagtagtagaagtagcagcatcatcatccctaccaagactatgacacatatgcgcaagatgcattaggagaatgcatctcagaaaacaggttgagagaatatagcaagaaacaaattttgtgcagaagagcctttcatcagctgactgcctcaaatagggtgagcgtggaaaagaaggttgaaggatgttagatattctgacctgcaataactgttagggaggatgaatttgcacttggaataggaaatggcaaggtgactcctgctgagggagagcagtgggctatgtgtcccccattccaggagccctgtgatgtaactggagagcaaactgcaggaagttaaaagagggaaaacaaattaactctgatgcctgggaggggcaaattttcaacatcgcagttacttttgataatactgtgtatttactttttttattctaacttgcaattaaaacatttttgaggtaaaataatgagaccttgatgtgtgatctctttttccccccagctacctctgaacagtgcagatgagatttatgagctacgtgtaaccggacgtacccaggatgagattttattctctaatagtacccgcttatcatttgagaccaagagaatatctgtcttcattcaaacagacaaggccttatacaagccaaagcaagaagtgaagtttcgcattgttacactcttctcagattttaagccttacaaaacctctttaaacattctcattaaggtaagtgccagacagaaatgaagcaaggaattctagccatcttactaaacccctctgggaagttctgcttgtgttactgacactggaatattttagaattcacctaagataagcttccctcccaacatggaactcctctaataggaaagaaggtggtgcatgcactgggttaagagctcagcctctagagtcaacctgcttgagttccaggcctggggtcttcattgatttatacagttgtcaaacatttattaaacttctgtgttccaggcacagcgatagggcagtgaacagaagagattaagtccctgctgacactgagtttatttttcagtgggtagtaggagacagacataataaataaacatacaaatatatatttataaagggacagatatgtatgtatttgtgtgtgtgtatgagagagaaaaagggagtgagagacagagagtttgtgtttgctattttctttctttcttttttttttttgagatggagtttcactcttgttgcccaggctggagtgcaatggcacgatcttggctcactgcaacctccgcctccttggttcaagcgattctcctgcctcagcctcctgagtagctgggattataggcatgtgccaccacgtctgcctaaatttgaatttttagtagagacggggtttcaccatgttggtcaggctgacctcgtgatccacccacctcagcctcccaaagatgctgggattataggcgtgagccactgcgcccagcatgtttgttgctttctctagggttgtctgggaagactgatttgagcagagagccaaaggcagtaaaagaaaataagcccatacagagggggaagcacatggaaaggccctgagggggagcttgtttggcgcattggaggaacaacaagctggcagtgtgctggagccccggggcgaggggacaggtgctaggacatgaggtcctatacaagtaggtgggttagggtggggctcatgcagggccttattggccatgatagggactttgaaacttatgctaagtgaagtgagaattcactggagaattctgaggcaagacttgatgtaatctaacttaacatcttaaaaggatcactgtcagctctaagaagaatagatgctagatgctagctgtgtgatcctgggtaaatttattaaccttctagaacctcagtttccttatctagaaaatatgtaataataaaacctcaaaaggtttttatgaggcttaagtgagataattcaagtaaaccatttagaactgtgtctggcacatagtacatgctcactaaacgttagccattattattattttaggaaccccttttgaaaggtagtagttttgtctctgctgcttaatactctgatgatttggaggcactgtggttagcacactgagtgctttcctgtgagaatcaagttgaagacaactgagatccagctgggcctggttttctgtatttaaacggagaagaacactggacatttgatcattacttggaaatagggtgactaacatcccagtctgcctgggatgcctctgattttaaaactgaaaagtctctggtcctgggaacctccttagtctcaggacattggttactccagatattctaatgaataacatagtgtggaaggtaaagtaggccttttagtttggtatcttcctattcttagtttatttgttgttataaattaaaacaacaaaacccaatcaaataaacatgtatacatttaactttgagccaagatatatttgtagccagtatcacatttgttgccatggtgttcaatgcatattgcttgaattgaactagcattatttcagagtttgcctttggtatgtaatggaatgtttataaagcaggttgacatagtgaatagtatttctaaattcatgtcacccccctgagcagagttgaactgactccattcataccatctttcatcatttatccacatatatggagagcttactgtatgtcagaaaggatgtgtacaatagatggtttaataaatgtctggctatctctgggtgtttacattcaatgcttccttctactgcaggcaaataaaagttagcactgcataaattgcctgttctagacatcaacccagaactaaccctgctggttctggataattagtctgtgcattttcatagttctgcctgtctactctgctctagtatcttcctttgaatctttgatttgcagattctttgggctcttctgtgcagtttgggacttagcagaccacgtttggctttctggaaagggctcagagagactttcctcttattagctctggtactgatatgactctcttggccaggggaggggagtttaaactaaaattctacctggaacccaaagtgttttggaactatgagtgaggggtggccatgctcctgtctctgtacctgggaagtgatgctcaaatgtggacttaggtctagctgccttcctccttgtaacttgcagaggccaggtgggagcagtaatgtgaactctttcagctgaaaacagacatttgggccaggtttacaagtctatgatattttctacatctttcagtgtggaataattggtgtcttggcaaaacttttcagaacaaattgggacttagcctgaactggagcccctgactgagacagttgtactccttggcacagcaccacctgcaggctgatgtggagaagtgcacctgagagttaacggggcccatcttgcccagctagaaatggctgcaggatgtagctaagatactgactgtcacagcaccttcagggtgttcattgttgttcttggggactgcaggccatctttgggtgttattcattttgcatgccccaataactggtcttctcaggagggaaaggagcttcgaggccttttggcagtagaaaaaacataacctatgtctcccacgcttctggcctcctctagccaatttggcctgacacaatggaattgagtgcctctgacactgcgatggcagctggcatggctggcttctgctctgacctctccatccagaagttgttggtgctagtacgggtgaatgatcttgtaggggaacaggtgttattggcttgggggtatatcctgttattgtgccctgacactcagttttggagcagtggtggctaactcagaacctgaccgctggccaggtgaagaagctaccttatttgagtgatttgaattctctaattctacaggctggacagacatgttattcacacataatccagaaatagtcctcacagacatattctccagccagggagcttactgcttgagacaatcaggtactgtgtgctgtgttgaggcatctcagagatccagagcgatctaaaggtgactcgaagggcatgtggggccactattccaggatctctggcctgcagcttttctggctgtgacgggggtattgctcatactgtacatggctgtgtcgtagcagcagatggccgcatgcaaatgctgggctccgctgtgacatcaccatgcttggctggttcaaatcctgatgtgtcttgtagacttctggtgtttctgcattctctccctctgccttattggtaacagttagacctaggtccaagacaggcttgggaaagcagaggaattatctcattctcccccaaccctccagatcccccaggtacaaagccatcaatgaggtcagttcagacttcattgtccaggagaaatgtatgccctcactaccataatgtttcagtagaatatggacattccattttcctacacttcaggtaacaccaagaattattgttattattatttttatctttgtcagactgacagaagaaacacaatattgttttcatttgtatttccttaattactagacagcatatatttattggctatttgtatttcttcctttgttcctgagcctttgaacttcatagccctcccatgcgtcatgctgtggcaggcacagtagggccaactgcccattacaatgcctggcccaggagtttaccaaggatacagtgacctgcttgttcttgacttgcttttggtctctggttttcacaattggtttctggcttattagactgctttctgcacagttctcagcattgtacttacccctaactgtcatatctccactctgggagagaggtttcttctgttctaataactggccccactcactacttctaggcaaagtttagaggataagtctaagggaaaatattcaacccctgctctcagtcacagtctagttgggaataataaaatatagatttttggcaaaataaaatatgtaaaataaacatattttactgcctttaacaaaaatatgtattcaagagagataaactccagatatactagggactttccaggaagaagtcacctctgcctattggaggcatgtataggaggcaagaaactgaaactgatttcaccagtggacaaggaagggagggatttccatgcagcagttgcagagacctacatgcatgggctttttgggaataaactgcaaacaaatccgtatgtttggaggaagatgagcctagaaatgtagatggagtagtattagtaagggccttgtaaactaggcaaaggagtgtagacttcctgtaggcaaacaaaagccatgggtacctagtggtctagtataatcatcatatactataattagggactataaaaagtgtatagccactgctttttatatgccagggactgtgccaagtatttcaaccactgtaactcattctcagatttgcgtttcagatggatcacactgttggcagtggggaagatgtattgtagagggcaagactagagggggaagattagttgcattagttagaaaataggacatggtggctggatgtgaggatggaaagaaggagacaaattagagatatattaacctaacaaagttaaaatgtcaggaaatgtgagagaggaatctaggatgactgctggaatggcttggataaatgttgcatgaagggattgttgtttgggaggttataggaagaatgaagtgttttccatgtatatccgtgattaaacatctctctaatatgcttttgttgagttaaaaggcagacatgagtttggattctgaatttcatcatgcactggtgctgtaatattgagtcatgccagtcacttgaatgcgtacctccctctccaggcatcagttttctcaactataaagtgaggataaccatgtcctaaaggagaattgtaatgattagagataaggcagagtgcctgacacatattgggcctttaataaatggggcctgttatctctacagttaaattttcttttaacactactaccaccaccgccgccaccaggggtttggtgacgtacatgttgtagtgtttcatgtagaaggaaatagggtgccaggaattaaaaggtggagcagaatcaagatgaacttgggagaaatatgagaaaagaataaactttgatttgtcttctttagaaatatagagcctacgttttccaaaatgttcatgcagcattcatccaagccattccagcagtcatcctagattcctctctcacatttccagaccttttaactttgttaggttaatatatctctaatgtgtctccttctttccatcctcacatcctgccatccagccatatttgtgccgtattttggagtaaagttctggacctgggtgggaatgctgcaaggcattattcctaacctgataggatacacatgcacatgggcagcctctacatacttacatgtctggttttcattttaggaccccaaatcaaatttgatccaacagtggttgtcacaacaaagtgatcttggagtcatttccaaaacttttcagctatcttcccatccaatacttggtgactggtctattcaagttcaagtgaatgtgagtataaatatattttttggggggaatgttaaagtgatttaattaggtcaggtgggggaaaatctccaaagtcatttatacaatgaagagaaaaaaattaatgtgaacatttagacaatttaaacggtttatttttaatttatgatgtttatcaagggtttatttagctttcattctaacatattagaattttcataactgttgtctttttctatgatatgatgtttaaaggttaaaacattttgacattttagtacacaatgtttacttatttgtttcatgcattattttaaaactaagtaatgaacacatagctattatttggcaaattttatgccttagaataatgactcctaatgagtgattagattaacctacttttatctttgttttaagaaacagtgacttaaatagctacaccgactgctattccccaatcctttttccctagcttctacacctattgcctttacttgctgccaacttgtatagctctgaaatctaaatggagggcattaaatggcatataaatctaaatggggggcattcattggaatgaatgagacataaacacaatgggatggaaacaattttaaaaagcaatgagacttaactgttttatgtgatataaattggtcatttagtatataacatgtaaacctttatatttttctatatttatgtgacatataaacatataagatataatcaactttttctgtatctaaaggggaagatatgtaatatgaaatgcatgaaattgtagcttattctaagcattgttgctgagccttgagtaggtgggactcgtgtgtgaattgacctgtatgaatgagaacagtgctggaggcacaatggactctcaatatttgcttcatggccaccctgcatctttatgggtgtttgtatgatgtgtttaccaatattattctttttaaggtagcagaagctctaccgaatgaatgtatgatgtggttttaaagaacatttgaggcaatattatgaaaggggctcatactgttagagaacaatgtaatgcataaccattaaagtcatggacaattttcagtgaggtctttgcttatttccttacttataacagtgtaataataaccactgttataaatggcagcctagagcaggatgtgatgagttctaggggaagtggaattctttatatctgagcttgtagagaaagtggaaagagtaggcatttgtgaaacttagaaaatagggaaaaatttgtgtgggagtagggaaaatggaagagaacgttatgtgtctggggatttgggagaagttgatgttactggagcatgtggagaatgatggcggtgtagattaggaagcacgttgtgagtttaaagtagtttgaatattattttcagttcccacttaaattcttaagaatcactttttttggtccatccatccatcgatccttctatccacccacccacccaccaacccagtatgtgttaaggactttatggctgtgatgaatacaaagaaggtaaacatatgacctccattttcaaaggtcattgtcatggtgacatgaacaatatgataaaaattaaatgacataagggggacagacaaacacagggcagtgcaatagcagaggaattgtaaggtgttcagtccagcttggtgataaagagggtttattgttagcacaagcactgatgttttggggccagctgctccttctgtctcccatggtctgctctgttctcctttcactcttctgccaacctttgaggtgttcttcagttcttctgattccattagcttagctaaataaccatcatgcccagaatctttaaagcaagcctctgcacaggtggctggcagcctgtgggtgggccgccctgggtcaaggtgtccatttttggtccattcagatgccacctatgcacaatgaccagcaagagcagttttagctggataacaggcgctgagggattaatttgttcattgaatggtggacagaataagtaccagaagagagggggatagaatagcagagggagactttgcagaagatgtgagattatactttgaaagatttataggatttatcatgttgtggtttgtggacttggcttgtcatattgcttttatagaaaacaaatgctcttaaggaaatttaggtgcttaaaaaatgaaaagcatttgcaggatctggcccttgcccaacttttcagtcttgtaaagtgccgcccttcctcttgaactctatgctttagacatcttatgtcccttaagtttcttaaactcaccgatctgtctcattctagagcctttcatcatgctgttccctctgctgagaatgttttttcttccttattctcgctacttgcttttaacctgcagccattctctaaagtggcctggctgttccagacattcccatagtactgtgtgcttcccttaattcattcatctcacttttaattagtggtccatgatagacagtagcctttgtaaagctggtgaccttctggtcttgctcacctctctattcctgggaccaagttcagtgcttttgcatgtaagtagaaagcagtattttcttaaaacgaatgtgtgaaaactatatagcaataatttgtcttgaaccaaatgcaattttcccttttgtatattctataaagcatctttatctttttgaagacaagtatactgatcaggtacttgtcatttgaggtatgttaatttgaggcattcagctaagaaaaaataagccccttaaaaaaaagagcccttttagaaccaccaggggtcagtataaccaaggaaatgttatgagaagcaactgtggccttggtctctggcttttgtttttctttgactactgcgcagcattaaaggactgtatatttcttgttattaaaccccttttcttttagtagtgaataataacatagaggaaatgtatttattatttaaatagcccaccattagagactatatttttacttttcggtggcagtcaccattctcaatataaaactcagggaaggaaaatatttattttcaagaaagtattggctgggcgtggtggctcacacctgtaatcccagcactttgggaagccgaggcgggcggatcacgaggtcaggagaccgagaccatcttggctaatacagtgaaaccccgtctctactaaaaatacgaaaaattagctgggtgtggtggcgggcgcctgtagtcccagctactcgggaggctgaggcaggagaatggcgtgaacctgggaggcggagcttgcagtgagccaagatcatgccaccgctctccagcctgggcgacagagtgatactctggctaaaaaaaaaggaagtattttttaaattttttaatttgtaagagacagggttgtcgtctgtcactcaggctagagtgaagtggcacaatcatagttcactgcagcctcgaactcctgggctcaagtgatcctcctgcctcagcctcctgagtagcagggactacaggtatgtgccactacgcctgcctagttaaaaaatttttttttccttttcatagagacagggtcttgttatgttgcccaggctgatcttgagctcctggactcaagcaatccttctgccttggcctcacaaagtgctgggattacatgtgtgagccatcatacacagcctttgggagagttttgaaattccattttgtctgtagaaaaaatatggaatgatatgagtattcccactgatggacaatctctttaagaattaccggagttatcagagctttgatttgtaatgactatacaggtaatcagaaagtggtattcttcagttaccctttgtcctaggtcaggaaaaggatcctttaagtaaaacatacttgacggctccttggcatttctccacttgtattaataacatgtttgtttgtagagtaagagtgaataagtcctttatgataccgtgttaacctttctggattaatctaaattgtttgcccttcaagtattgtattgcttttcaccttcaaggttttttatgatagtaatggtgagtaattattttggtctagtatgatttctagttttcttttctttctttcttttttttttttttcgagacagagtctcgctcttttgcccaggccgtggtgtgatctcggctcactgaaacctccacatcccaggttcaagcgattctcctgcctcagcctcctgagtagctgggattacaggcatgcaccaccatgcccagctaatttttgtatttttagtagagacggtttcatcatgttggccagggtggtcttgaactccagacctcaagtgatgcaccctactcggcctcccaaagtgctgggattacaggcatgagccactgtgcctggccaagaaaggaaacaaatgttttgggggattagttaagtgatttgcccaatgtcccacaacttaccaaactaggattagaactcaggccttttgacaccaaatccaaggttctctctaccctgccaccttggttttccatcttatgttttatctctgtcattgttcagcatatgatggtgggacatcataagttctcaatatatacatagactttttttttttttacaatgctagtttaatcaaattgcaaagaaactcttgatgattataatgtttaagacctcttaaaatcagtaaagtttagtaagagccctggctctttttgtgctacttatacgtgtgcttaattgacacacatattctagtgtgaatagttctttgctactttggggattgtacttcttctcttgagaatgtgaccaagtcttctacttctgccatactttgattgccctgctctttttcatcatttctttgtctagagcaccaagccctcctctcagagggcagaggtatattttagctgtaacatcttttcatagaagtgtgttttatagggccgttatactttaggtacattataagttgagtgtgggaatatgttctgatttaataattgacttgaaaatacaccttaggaagataatgtgttttaaaagttagacattcctttattttcatttctttgcaatatagttctctaggtaccttatctctaggtatgttatctcttgattggtgttgacagttttctcaaataattgcacatggtttttttgttttgttttgttttgttttttgagaaagagtctcactctgttgaccagtctggagtgcagtgtgcaatctcagctcattgcaacctccacctcccaggttgaagtgattttcctgcctcagcctcctgagtagctgggattacaggtgtgcaccatcatgttcagctaatttttgtatttttagtagagatggggtttcaccatgttggtcaggctgggctcgaactcctgacctcaggtgattcacttgccttgggtttccaaagtgctaggattacaggcatgagccactgtgcctggcctgcaaatggtttttccctccattttttattttctgtagtaaaatacacataacgtaaaatttgccattgtaaccatttttaagtgtacagttcagtggtattaagtacattaatattgttgtgcattcatcaccaccatccatctctgtaactcttttcatcttgcaaaactgaaaatctacacctattaaacaataactctccattccctcccaccccccagcccctggcagccactgtacattctatctctgtggtgttgattagtcttatatcagcagaatcatacaggatctctttttgagactggcttttttctcttagcataatgttattatggctcacccatgttgtagcatatatcagaattttctctcttttaaaggctgaataatattccattgtgtgaatataccacatttggttgcgaatgtttttgcatctatgatttaaaaattatattcgaggttattagaaggtgattttaggggttctttaaaagaaaggctaatgttggtgtctgagaaccaggcttctgggagccaggaggcatctggccagagcagtgcagcctgcagcccagagctccaggtctttgcgtgacccacgcactggtgctcatgttcctccaagagcccgaaagaagagcctgagtcactgagagattcctggtcatttgatgacggcagccctgtgctgtctttcctcattgtcagatggaagtctcttcttctttctagagtggcttaggcatttgagtttaccataatggccacctgaggctgcagctggttctgaaacatcagtgtgccacagaatcaatggactgggagcttgtttaaagatgcatagtccaggtcccacccccagatcacaatttactaattttggcatgggagctaggagtttgaattttaaataagcactcaaggaaattctactagttttttgaaccacattttgagaagtgctcataaatgcccgcagctaggcatctttagaatccatcttttccattgagaggcagtgttgggcagtgttgggcagtcaacaaggtatggaactggggacaggccatctgatttattctttgaattcctcagcagtgctactttctgctatttactttacctttttaggtaatcagctcagtagagctccccagcaccttagacatactaagtcagaatttctgggacaatgtatatcctttacaacagcttctctgatgcttcagatgcacagccagcttgggaaccactgaacttgataatcatcttttctatctgtcactaactacaatttcgtaaccgttgtctcaatcttaagccattgttagaggtggggaacaagaaatagcaagcagaaaactcaacagggttaaggcttgaagtcactcttctggagccctgtataatgaaacgggttatcaaattattatgtaactcagaagcaatctgcattgagttatttctttgcatctaacagttatatctagtttctcttgagttacttgttttttctagattaggtgagggttgccaacaccttactgctttttataacctttcaggatattccttattttttctggacttgttgtccagcctctgcctgggtcagcttgctgcttctgttaagtatctctggagccgtttttcttttgcaaaagagcacatctttgtttggacagttcttgtccctaaagcactctaccaggagcatctgcttaacccgcctggcttgtgacgacaacttaacagaaagcatggagcaaaactttgacaggtcagaaaacagtggcattctctctgaaatgtggttgtggcttccaaaatactttcactagtctttgcttataagaagaatgctttgtttgggaaggatctcaaactcttacttccttgttcagtgagaaagggagggaggagatggttttagaatattgatttcttagagcattatctggcagagctcagcactttctcctccattcttccaaaggccccgataaacacctctagaatagcatttattaatcagtgtagcgttattttcgttttttaaaaactgtggtaagatatatatgtaaaatttaccattttaacaatttaaaagttaagtagcatcaggtgcattcacattgtggtgcaaccatctgccaccatccatctccagaacctattattatcttcagatatttaaaaaaatgtctgcctcatttcttaaactgtgaactccttgaagacaggaattctattttattaattttcatatttgttctgtctaatataatatctgacctgttatgggaactcattcatgcttgtgggatgaaagaatgagtgaatagagcttcttctagatgattgctgttattatcctttgtgatgttctttgacttctagtctcactctgctatatcatcttgcaacttagtagaaatatctttgtatattttcattttgagaatatatatggttgctgtatttgatgaacctgtgagctaatggaaaacaggacttttggattaatgccctggactttctcattttgaaaattaaaaaaaatctcaggcaagagctgaatattctagtttgttataaagtctaaaatagacttataattttggtgccatattattcttgtgtctttattcagccatttgatctgctagtgccagtcctttggcagtgtgcattttaatttctaggccccatatgcaaattttcatgaggagttctttgttttgttctttctctacagaagccaccctaggaggacccctcctttcaaatgtgtcttctgtacccctctctgaagagacatgtttttggcatcagttagaaaactttggggccagactttaggatgttgtgttcatcaatgaaatggagggtctgagtatgtagcatcatcagtacataggatagggactcagtgctatagatgatcttagaggtcgcctagatccatctccccactttatggaggaagaatctgagataagtgacgtgacctggttaggctcacacagtgtgttgtgggagggtcaggactagcaactagtttactcatactttcagttctgtaaaattaaattatttaatatgtgcagcaattgctgttttatttatttatttatttttgagacagagtcttgctctgtcacccaggctggagtgcagtggtgctgtctcagcttactgcaacttctgcctcccaggttcaagtgattctcctgccttagcctcctgagtagctgggatttacaggcatgtgccaccatgggcctggctaatttttgtatttttagtagagacagggtttcaccatgttggccaggctggtcttgaactcttgacctcaggtgatccgcccgccctggcctcccaaagtgctgggattacaggcatgagtcatcatgcctggccagcaattgctgttttaatatggcctccttttaaggttgaatttagatgtcaacagggcttgctgtatgcattggtggagaagatacctacttcttttatatgacttgtggatgccacgggatcaccttgtttgcacgttggattgttcccaacgtgtcccagattctgaccacagcagccatgtgtttagattgaagatttgagtccagcatgtaggttacttggttcatctatttaatatccattaatatactattaaggattaggctgctgtcacctcacagcctctataaccttggtcatatgaggcttacaaagattaattttttgttgtttgtttttgagacagagtctcgctgtgtcacccaggctggagtgcagtggcacaatcttggcttactgtaacctccgcctcccaggttcaagcgattcacctgcctcagcctcccgagtaactgggattacaggcatccaccaccacgcctggctaaatttttgtatttttagtagagacaaggtttcgccacattggccaggctggtcttgaacttctgacctcaagtgatccgcctgcctctgccttccaaagggctgggattataggcataagccactgtgctcagccaagaagattaattttaaaaataactgtttacctttaggtagattcacagaaagttgcgaagatagcacaaagcggccctatattatcttaacgcagtgcacccagtggttatatcttatgttattatagtacaatataaaaagcaagaatttgacgtttgtgtggtatgtgtgtatggttctgtatgatgctttattttcagtggcatagagggagttttggaaaatgataactcactgggctctgaccagtggtggcagccctgggtgagggggaagggggcactgaaatgagtaccaagtccctgggtggagtgaggaaagggagaaagagcaagaaatggagttattttccctcaagggtaactttcctattcagtacaaacctgtagctatgctgctgcttttgctcccttgcttgagataggtgcccaagaaaggtggtcatgttacatgtctttaaaaaccatagttccttctactttgagtaggaacagagagggttaaatgggtgatttttgtttattgtttgtttttaaagagaatatgtttctagttagtactttttttttttcaacaccaaggaaacaagtttgtcccttgtactgcataatgtatttgtactgcagatggtaacactgttttaggagtatgaatgtgcttgtgatccctggatacctggccactattctgctaactggaggcttgtatggtctatgtcttggtcattggttagatccattattcccaagtcctgtcactatgagtgactgtcaggtatagaccagcttcagttcttcaggtgtttagttccagccttgataagaaccagaatatttgtaatcctttctaatgagagaagggatccaggaacaaaactgtctcctggggaggttctgattcctccctcctcacactcagtagattatcttcctttccacttcacagagaacacagtcatcagatgggaatttctttcactttttctgccagatttgcatgtgttgcctgtgcccatctcatgcttattctcttctttttagaggaaaggtcctattcttcacatctaagaccaatatcccgatttctgccttggcttctttcttcctctactttgtcagaaaacttgcagtgttgacagtctctttcttctcagtcttcaaactggatctctttctgtcttagatctttttataaaatctaatatgtttaattctttctcattgaaaaaacaaaaaatatagagaagtactgtactttaactctacttcctcttcagtgacttcacattcccattctagccagtcttctaaaaaaaaatgtctgatctctctgcctccattttcccaactcactccagtttgactgagatttctttctacttgtttggattcttcttcttggtcactttcgtcatttactctctattacatattggcacattgcaagtttggttttaagtttctttcatttctcactctagggaagttcacccgaaggcatggtttcagtttccatctatacaccaatgactctcaaattggcctctctgagagaacctatacctctgagttctagacctttaaaactatctacctttaaaactatcaacatctgtatttggatgtttcaaagcaccccaaactcttcatgtccagtatcattcttaacaatctttccccaccacacctggctcctctgcagcatttcctaccttatttaattctctatccattcggctgtgcaggctggtaaccttagagttcttgacacctcatgctgcctgaccacccatattcaggccttcatcaattcccacagctttttcccttaaataaatatatttctttctttcttttttttttttcctaccctgagacagagtcttgctctgtcacccaggcaatctcagctcactgcaacctccacctcccgagttcaagtgatcttcctgcctccatctcccgagtagctgggagtacaggcgtgtgccaccatgcccggctaatttttgtattttttgtagagatggggtttcaccatgttgcccaggctggtctctaactccttagctcaagtgatctgcctgcctcaaccttaaatatatttcaaatccacctacttctctatttccacctctccctcctttgtccaagccactattatattgttcctagatattacagtgtctcttaatctctctgcatttggtttttttcccctttgcaaccaattatctacacagcagtaaaaataatctcaacattagctggatcatgttattccccagcttaaaactgtccaaagactttccactggcctcagaacaaaattcagatgttttaccatggcctacacagggtcttacctgatctgactctgtttttcccatctcatctccagatttcataactctctgtaaatgttaattcacagcttttatcataatttgtaatacatactcacatatgtggttatttgataaatatccttctttccactagatcagaaggtccatgcggggttgtattcccattacacctgccactcaggcgcaatgaatatctcttgaaggaatggatgaatgaatgcatttgttgtgtttgggcctcagccctggtaattctgattcagtagctctggggtaggaactggacacctctatttattaaacccaccacagctgattctgatgctgagtttgggttgaaccccatagagaaatatgttgcaactacagtttagaccacaggtgtttagactctaaacaggaaagggaaggaaaggatgatgtaaatgttaataaacattttctctcattttgcaaaccctattgactctgtcattcctctaagtaggacagtgtacatcagctgacacttttacaggatgatatttccattgtgatttcttttttatttttaagctctcccaattttatggtaaaaataaaagaggggaaaaatagggtattacatgattgctattacgtaggcaataggtttaggcatagtcaggttagtagggatcggaataaagctaaaaatatgaagcttttgtgttgtatgcgagggtgggaagaaacaccagtcagtacacatctaaaggtgacaagacacagacctggctttcaaggagcttacaatcagaaaagcttcgtgtaacaaatgcaaagagcattagattaggagtcctaagacctgggtactgtgctctagttaagtgatggtgggcatggcatttcagctgtgggtctccgtttcctcagctgtaaaataaggggtttggatcaagggatttttaaggatcttcacaactttacaagtccaagatagggctggaggggactgtaggatttggatgggaagtggtgggctctgagctggctgacagggctgtggggctgggagcaggcactggctggcatggagggcttgtagagagtagtagttgaagagaaaggtggggaagtttgtgggccgagctgtggaggatattggctatcaggctgaaattttgtatttcattttgtagacaacaggcagctctaaaaacttttgtgtattttactttgaatttcaatcagtgatgcaaatttcaatataggacttctgaggacaaaggaaacaaaatgtgtgtgaatgggtctctcaaattataaaagttataggatcataccttcataattttcctctggttataaaagtaatgcatgagtaaggtaaaaacatccaaacatgatagtgtagaaagtatgacacccttatggtaaacttccaaacaaacaaaaatcatcagtatgtgttgtcttcttattgctttagtagaaagtttctatgtaaaagtatgacatgattaaagttgtattttaggaagatcactttggtggcagcatgtagggtgattagagggagagaaactaaagtccaggagactaccagggggttagtattattgtttaacaaatatacgaataccttcaatgttagcttataatcgaataccttcagtgttagtaagttcaaaggtaatgggggactgcggtaagagagcagaaaaaattaaagaggaatggatgaattcaagagacacttaaaggcagaatcattaggattagtgactggatttcgattggagcagagaagaaagaggagcaaaaggtacctgggaatttcaagttgggtctttgggagaatcacccatatcagttctagggaagttagggatggaagctcagtttgggtgagtggtatgagctagatgtatttggactgagccatcagaaatcacatttaggagcaaagcagagaagccatccaaagcaatagagaaagaacagccagttttgggaagagaaaagcaagcaagttcaggcacagagcagagggcaagagattcagagagagtggctttccaggtgctgcagaggcctcaaagggagtgaggcctgagaaaggtgacaggcggttagaggaaagcaacctggcataccgagcatcttctggggtcagtgaaatgggagaggcagaatcgagatttcaagagcaataaagcgcataaatagctatacataacatagctatgtaatgtagggtaatgtatataatagtctacaacttctgttcctaagaaggagagaattaatatgattatctggtggaggcagcagcaatataatttcatttatgttatggtattcctattcttacttaacatattcatgcccagttatttatgtgtaactgtgaggttgaacatttattacttgacaggtgaagtaaaaaagcacattatttttgtgccattttgtcctgttctttgggacgaattcttccctactccttggataaaatgtagggaaaatctcatcatttttatggttactctttggtaacaaaaggtcctgtcatgttcggttactttcatatacacagtctacattcagtaattaatatgtccagtctaataaaataaaatgctcccttctccagctcgggtcttctttggtctggatgcctgcctccaactcactaggctgcctttgactcctccagactgaattgggtggaggaaagagaagtgaggggtaacaaaattctcatctgatgtataaggatgagtcatgtgaacttgctaatatttgtcctgcaaaaatgtcaatttaatatggttcaatgtaatactgttgtcatctgcatgagacctgtctgggctaagacggcatttaaaactacatttttcctttttagaactcctttctgtattcctaggaggacccttaagattgtggggaggtctttcatccaaagtaccctggatgcttttgaatctgtctcctccaaatggcagctcataactccatctttagctgctgggcatctagatcacacacctcagcttccctcttctgagggcttgccttattcctactaaggctgttttgatcaggatagaaaacagttccatgctgacttgctcttttggcatatctagttgagggaaaatgctcatgctttctctgatcctgaacattcaggagatgcagaccactcctagcatagcacactcttagctccactgccagcacaaatattataccctttagagttttcaggtgtgtcaacagcctgctcactgacagcttgaggatgctcccagggacacatacctagttgtctgcattgtctatggaagcccgtttccctaggcttgaaatgagggccaagcaactctacctgatgccccagggtggggtgagtgccactcctagctcatcgaaagctctctcctgaaattcccttctagttttatttttatcttgacctttccaccttggtgatgggttaagagttacaaaaccagtttttggaaacctcctttacaggtcctgcatccttcacctgtggaaggtggacatagttgacatctattgtcttgggggctaaacgcaaaactgagtctgaaatagttcccttttaacctcccgttatgtgcagatttaacaaattcagtgcctttcttaaagtaaaaggtacatccagacactggagagtagtgctaaaacaaactattagggaattgaaatgaccataaaagaacataatgaacaaacagaaataatccaaccagcaccttagttttgattctggcattgctttttactccagaagcaagagttgaaagaaactgacctgcattttaaaatatattttttaatggtcatgtaatatgctatatttcttcaaatctgttaaaaatagaaactcaagagttggatggcatcatggttagggaagaaaaattctgtaactggaatagatggttgtagtaattcacatgtctcaatttgtattctagtcataacatacttcttaaaagggtggtaaaaataatgtgttttctctttcccacttcatttgtctaatttctgtaacatacaccctcacaatgaattattgactcagggacaagaggtagagaaattacagaggttgctaagaatacctgctgactcttattttctacttctgctttagaagttgtttagaaaatctaatcaaggccgtcttacatccagtagaaacagagagtttctactggatgtgctttggagcaggtttttaagagagagctttccccatggaagagtgaccatattggggaaagaagagctcaggagacatgagttatgcttctcttgcctggggaggtgtttgcttaaaagacatgctgcccaagtatttaagccttcaggttagggtcttttttccagttgttggcagagtgaatgagcatgaactgtatttgatgaactacagttaacacaaatactcattttgaagcagataaaattattttgaaagtgaaggaaaattgtttcataagagaaacttgtacttcctacgaaaagactgtgtttttttgctccatgtttttagtaaagtttagtcaaatttagtttagttcacctagaacgaacactgaacaatttggaaatacattttattcctttttttaaactagaggttagcaaaccctggcagaaaaaccaaatgtagcctgacacctgtttttgtgaataaagatttattggaacatagtcgtgctcgtttgtttacaaattgtgtctggctacatttgcattgcaacagcattgttaagtagttgggacagagaccatatggcctgcaaagcctaaaatatttactatcccactctttacaggaaaagtttgcagatccctgttctagattaatgaaagtactcagtatcagtgtttttgtggttatatatggcataaatggctattaattctctgaattattattaattttaaatatttcagtatcttttgtacttgattatatatctcattaaaataattgaattaattctgaaaattggtatggtctgtttgcctaatggacaatacactggacattacaaaactaatttctgcttttcaaatcccttggacagtaaaataatttatttcttgatttgcattttaccacatatgagcaccttgggaagacattgtgtagtagaaagcatactgtcagcacccacttccaaaatgttttctagatttattggaacaatttaaaatgtcagtgaaaagaagtacttttcttcctttgtgttcttcatttttctatgatggctggatgcattcactccttggggcattcatgttccttccttaaagggcagagttaaggttactctgtgggtcatttgcctcttcagggttgtttgatccttctcaagagaagattattttaatgtattgcaggagatgctgcctgataactgaggctgatctgttgagcactgtaggaaccagactggggacaagaattgactcatttattcatttatacttatgtttattcaacaaacgttgaaggcatgctttactaggttctgtgctctcaaggatttcatagtctcttacaggagatggacacaaagcaaatgattatcatatactgtgttaggcaagatgattgagttatagtcaggatattataggagagaaggggcatctaatccaccatggggagagggcaatcaagaaaagctatttgaaagaggctaaatccagatcaataaatccaggacattctgtcagaaattcagatggagatgtctggcaggtggatttgagtctcaatctgggatagagataaggatttaggtgtctttattctaggaatggcagttaaaaccctgagagctgatgagagcctgaagagtgggaagagggctcagcatgggaaaggccaacatttaaggatcagaaagagatgcataaaggaaacaaggaaggggtcagagagataattaggaataccaagagaacaaaagacaatggtgtttagagactgagtgaggggaaggagacggtcaatggaaagatggaaaatccaggattgatcagggactggcaatgtaggaggcagaggggagatggaattcatttcaaatattctaatgtaaactacttatgtgttaaacaaatgatgacctaaaacttagtttcaggctgttgtttaaagtaggctcaaataagtaagttgatttcctatatttgtaaaagctaataatttttatttaatcaaacacacatttattgagcacttattttgtactaggtgctataacaggttggcaccctaagggataaactatgcgggatataaaaatgatcaaaaagtgaagtagtaatatttaagctaagccctggaaaatggggagggatggaagtacatataagtcaagaataggcaagagttagagcaaaaacacagtgcatgaaaccccaggacactgtcagtcttgaattattgttcttgactatgtctgtctccaccactagactctctaatgctgaggactgtgatttatagagcctcacatggtgttttgcatgttgtatttactcaattaatgtttgctatatgaatgaaacttgagaaacagaaacatcataattgttacttattccatagtcttgtctgtgctggcctcagtaataaagcaaaaactaacttaaagactagcattcttatgttcattagtaaaacaggtaatagataaattaccttcttgatttgacttttgagaatgacgtgttagaacttataaatgaatcaaatacgtgtaatttataatgttactatatgatatgaaaacaatttgagatagaagtcataaatatgaagtttcttaagactttgatcaaaacaacaaaatttctttgagattttctttttttaaaacttttatttttcaacaacagctaaccaaagatgggatcttctttacatgacaatgttgaagccaattgatacacaatttatttgttagcgtgttagtggttctatttgttttatattttgaagtgaactatggccttcttttaggactgaaaaataacttcgtggtgtacagatattttagattaaccaagggtacttgttaacaaaagctattattttatagctgcatctccgtgtttgatttgataaatttgggaattaaatttacaatgcaaatttcattagtggaattacatagccaatttggagaggttctatttaatgtgctaccttgatttagaatgagcgatttagaaatatgaagagttgactgggcatggtgtctcatgcctgtaatcctaggactttgggaggctgaggtgtgattgcttgagctcaggagtttgagaccagcctgggcaacatggcaaaatcctgttctacttaaaaaaaaaaaaaattagctgggcatagtgacttgcccctgtggtcccagctagttggtgggctgaggcaggagaatcgcttgagtccaggaggttgaggcttcagtgagctgtgtttgtgccactatactccagcctgggtgacaaagtgagaccctgtctgaaaaaacaaaaacaaaaacaaaagcaacaaaaaaaggagaaatatgaagagttagataaatgatacgataatagcccacgttttcttgttgattgtggaaaaggaaataattaacagtatctattataaccacataggatgtattgatttaagaattacagtagaaaataattcaaggaattggaaaagtgaggcatgttgttctatgaagattttgcatccttaattatttataagtatttgagttatgtgtaacttcattttctccattaatttttgataatgatatccaaaacaaatctgcagttatttgttagtttgacctgtgttatctttgcttcataaattcctcaattatctagtttaatctagttcttatttcacaaatgatggaagtcagattaagcagtttgtttaaatgacccgcaatgaattatagagataggtcaccattttatgctaacgggttggcaagaaaaattcatgaaattttacaggcttcatgttgcagttgtctacaaatacacttccataaatgaaaataaacaagtttgttcattgcatcattataaatgtaatttaaaaattaattttctaaattgttttatgcaagtaagtaagcaagcaaaataaataagaactcatatactttcctgtcttttttttctcccctgcccaataggaccagacatactatcaatcatttcaggtttcagaatatggtaagagttcctcaatctattttggaagaaaaaaacatttgttactttcagcagagattagagaaatttttaagagatgtattatttgaagtaaaaatctcaatggagttaaaattctggtgttttttaaaggcctaaccatattttttttcctttgtaaaaattctaaaatctcattatacagaaaaaagtagaaaaaaatcacctatagttgcattgtgctagtctttttcttatccacaacatgatttttctatttttctactttgttgtgataaaaaaatatttaaagtgttgcacttaaaaatacttaacaaattctcttccatatttttcatttgattgacattggtaaagatggtctgtttctcaggtaaatcctcttcttgcaggtgccatacttacaatatctgttagaaacccatagataaaaacagtgggacccatctattttgttggtgaatggagaggaatgagagatgagactgaaagcataggatcttagtattagttataatttgaatagttattttgaggttgcacatgcagtttttcatttgatttgagcttcttttttgagattgggttttatttaggcagtagaaattataatatacaggtagtaatacctcaggctctgtgggccatatgtctctgttgttactactcaattttgccgtggtagcatgagagcagccaaagataatatgtacatgaatgttgctgtggttcaataaactttattttatgggcatgaaaatttgaatttcatataattttcatatgtcatgaaatattcttcttcttttgatttttttcaaccagttaaaaattgtaaaaaatgttcttggttcatgctggtcatagtttgctgaactctgatctgtaactgtgctctccagtagcggggccacttgccatgtgtggctgttgagcacttcaaatgtggctagtccagatggagacagcagatgtcaaagacttagtacaagaaaaatgaaagaaagaaaaatagttcattaataaccatttttaaatttttattatttgttgaaaagatactattttagatatatagggttaagtaaaatataaaaattaatttcacctgcttatttttactttaaaaatttgactactagaaatgaaaaattacacatatggctcccattttatgtcttttagacagccctgatctagaagaataagtcataggggaccaacatttttataggctatctttatatcccattgtgatggtatgctgggtggttgtatgttgttgaatgaggtatagtggaggtggggaattgattgcaaacctatgatgtttgaggaagaggcatttggattttcttggtggtgggggttgcgggggcggggtcatagttgactcacgtgactttttggtctccctgtcctagactgatctagagtctaggagtgtcttggtacattcagggccattagccttgattggagctgaaggtctgccctatattgttgactatttggcttttttgatacttctcttatgttaattgaatggtgaggtgccttgttatgagagtggcctgtttctttggtcagagaactatagaaaaaaagttttatcgactgtaaagaaacacacattttttactctggtggagtgctttatatcaattatagtattagtacttataaaatagtttataccttaattattattattatttttcgagacggagtctcactgtgtcactcaggctggagtgcagtggcatgatctcgggtcactgcaaccactgcctcctgggttcaagcgattctcctgcctcagcctcctgagtagctgggattacaggcatgcaccaccatgcccaacaatttttgtatttttagtagagataggattcaccatgctggccaggctggtcttgaactcctgacctcaggtgatccacctgcctctgcctcccgagttctagaattacaggcgtgagccactactcccagcctcataccttaattatataaagctgaccaaattagggatttctagttttgggtgaaacaaagggcttttcatctgtcttaatatgtatttggattctaataaatttaagttcaaatagtacaaattattaactccttcacaacaattttatttttcattttattcagtggaagatgatagtgaagtagattctttaaaagatttacccttgcttcttcgtctcaaaaagaaaaaaagatttacccttgcttttcttttccagtattaccaaaatttgaagtgactttgcagacaccattatattgttctatgaattctaagcatttaaatggtaccatcacggcaaagtaagtgtcatttttcttttgatatgactcaaaaccattataaaactgtgtgaccaaaagctgattgtatacttcagaatattagggcaatttttgcttattaaaataccttagtggacagtaaatgactatttataataaataattaagcatgggacagagctccacatttcactgcatctatcactctgcttgcaagccgacccagtcttaaaatatttcccatatttcttagacttattaagggatttatattatagatagcactgtttttttttcagatgacatggacttgaagccaccacgcctggctaattttttttcctttatagagatggggtcttgccattttctccaggctggtcttgaactcctggcctcacatgatactcctgccttggtctcctaaagtgctgagactacaggcatgttccaccactcctgggctgatttgctttttaaaaattagtcaagcttttattttctgagtgattaacttatcccaaatgcttcccggttctatttgggacaataattgtatctttgtttcacaattattataaccagcttggtgtttggaaaactaaatctgcttcacattaaagtcaaaattaaaaatttttatgtctgagagtactttaaattatatttggattttaaagatccttttactaccatgtgatataactctgttaaaatacaatatcctggcattctagttttgcttttatttaatctttagcacgatacaagtagagtcaggtttcgaagactcttgaatgagtgaatttgatgctcaggttgctaaccagggtttccactgactttactgtttttgtttggaagtgtggtgcatttgaacttggatttttttttttttcttcttagtttggaatatgctatattttaagatttgcttttgagttgagttgatccagatgaggggctgtttctgtgttcagttaatggattcaggaagccgccgtttactgctgtgatttatagactgcaaagcaaaattgacttccatgtctggctcagcatttcacaatagagatagaagcaacccaggaaatgtacttaaaaaaggctttctgggccgggcgcagtggctcacgcctgtaatcccagcactttgggaggccgaggcgggcgggtcacaaggtcaggagatcgagaccatcttggctaacacggtgaaaccccgtctctactgaaaatacaaaaaattagccgggcgcggtggcgggcgcctgtagtcccagctactcgggaggctgaggcaggagaatggcgtgaacctgggaggcggagcttgcagtgagccgagattgtgccactgcagtccggcctgggctaaagagcgggaccccgtctcaaaaaaaaaaaaaaaaaaaaaaaaaaaaaagcctttctggcagtaaaatgtattgcctcttcttcacatgaagagactttcctataatgagagaggataaaattaatacatagaaagaaaagtagcagagaatatttgacttacgaagctaagtttgggccaggtgaggtggctcgtgcctataatcccagcactttggggggccaaactgggtggatcacttgaggtcaggagtttgagaccagcctggccaatatggtgaaactccatttctactgaaaatacaaaaattagctgggtgtagtggcagacgcctataatcccagctattcgggaggctgaagcagagaattgattgaacctgggaggcagaggttgcagtgaccctagatcgcaccactgcactccagcctgggtgacagagcgagactctgtctcaaaaaataaaataaaataaaattcgctggacgtggtggtgtgcgcttgtcatcccagctactcaggaggctgaggcaggagaatctcttgaacccctgaggtggaggttgcagtgagccgagatcatgccactgcatccagcctgggtgacagagtgagactgtgtctaaacacacacacacacacacacacacacacacacacacacacacacacacacacacacaaacccagaaactaagtttggtactacagattttaaaaattattcttattttaaattttttggcaaaaaatcaatttttgacagccatgagcacatttggtgcttcagaatctatggtgtaataaaccttcctcgctaatattggaacatgtagcaatagaccatggtgattgcactatcagctgacatttaaaaatcttctaaagctgcgaagtttcgtgggcattcagttaatgggccagtccagatttctaggagtgaaagatttatgtaatctttaaaaaatctttggacaggaaactgtcacttccaattatgatcaggtattttctggagtctttcagatggtcagaggttgggcagagtgtgtgttaagaactgttttaagctactatagttaaaagtcttcccattttggaaacttaatttcaaggatcaccatttattttttatttatttatttattttttgagttggagtctcactctgttgcccaggctggagtgcagtggcacgatcttggctcactgcagcctccacctcctgggttcaaacagttctctgcctcagcctccaagtagctgggattacaggcacccaccaccacgcctggctaatttttttgcatttttagtagagatggggtttcaccatcttggccaggctggtcttgaactcctgacctcgtgatccaccagcctcggcctcccaaagtgctgggattacaggcatgagccaccgtgcccatccaggatcaccgtttattaaagacatttttgttgggtttagtttaaaaaattatagtaggagtatgtttttaatgtaacttttttctttttaaaattttctctttttagtgttttgccatcccataatgtatttttttttaatttatttattttgagacagagtcttgctgtcttgctgtgttgtccaggctggagtgcagtgatgcgatctcggctcactgcaacctccacttcctgggttcaagcagttctcctgcctcagcctccaaagtagctgggagtacaggtgcctgccaccatgcccagctgatttttgtatttttagtagagacagggtttcactatgttggccaggctggtcttgcactcctgacctcgtgatccacccgcctcggcctcccaaagtgctgggattacaggcgtgagccaccgctcccagcccaatgtaattttttaaaatgttagattgctaattgctaatgtatgctattgaaagtagtatttttattgtgttctgacaatatcaagttgatacataaaaagactatgtttataattattcaggtatacatatgggaagccagtgaaaggagacgtaacgcttacatttttacctttatccttttggggaaagaagaaaaatattacaaaaacatttaaggtaacttttgcagacactttataacttgtgatgggtaaaatatgtgtatttttctagaaataagatttagtactgaattaacaaaaagttaagtgtaagaaaatcaagagctttccagcattgaacaaatgagaatttatgcaattatagcgattaaaatggtaccagagctatcatattgttgtgacttagtttgagttttatttctaaaatttgaattgctaaaatggtaaataatactgaacttttaaacaaaacagataaatggatctgcaaacttctcttttaatgatgaagagatgaaaaatgtaatggattcttcaaatggactttctgaatacctggatctatcttcccctggaccagtagaaattttaaccacagtgacagaatcagttacaggtttgtagactttaaagtggaggtaaaactattcatgtgacactgctttatcatctttcttattataactggcactttcatttgggagcatcattgactttctaaagatgctatttaatgttgaaattgttatgactgttagtctaagttgcaggatgattttataagggggaccttattttctatgaaagtcactacttcaaccacatgtgatagctcttcttaatttttttttccatttctactctttccccctgaaaactacatggaaaggcttacattttcagctggtaaccttcttctttttaaaatcactgaaatctcagctgttcctagacagttttcacttttaataagaaaataaagttgagtttcttggacctttctgttactatttcaacaactttagccaatccctgaaagagcaaaagactattctttcattggccttaatttgctgctgttgtacatgtcactgcggtagaatggcagcaatggtgcttagaggggatccatagagaacataatagaactgtgtggtgcttgtagtgtcaaagtcaatatgggaatgaggcttatgtgccctgatatttttaaccctttttgcaataggttagatggagagatttggtggatagaagctttgggtgaaacattacttttgctttctaaattgtgcaatttccaaaaaaggtatttcaagaaatgtaagcactaatgtgttcttcaagcaacatgattacatcattgagttttttgattatactactgtcttgaagccatctctcaacttcacagccactgtaagttggtatatttatttccagtccatagcagtaagttcagcttaatgaaatagaatgggaaataatattttcaatgcttttctaaaaatttaagccaaaaagtatataactttgtctctttagacatgtggggcatgtagatttgtttccaaatgacctttgtctattttttctaaaaaagtagttttcaacaacagtaaaaatattttttgaaaatgtatttttttttacaagcaatttaagttagatgtggattgctacactgaagcttttattaattaattgaaataattacatggtagtcaaaaatttcaatttcaatttggtttttataatgattaattgtagttctaacaaagatgttacattaaaaaattatcaacaaatctcattttttggagataatgttgaattaacacattaattgtgtgaatgttgacaatgagcaaggcatggtgttgggcagggctatagagccaagaagggctcagtccctaccctcaggttcacagtttttgtgatggtgacaggaaaatatatacttaactataactcatggcagattaagattagtgttacaaattaatttctgtagggatttaaagcaggggttgccaaactttttctgcaaagggctagagagtaaatattttcagctttgtggccatgtggtctttgtcacagctactcagccctgccattgtagtgtgaaagcagccatagccaatttataaataagtgagagtggaatgtgttccagtaaaactttgtttacaaacatactggattggcctatcagcttgcagtagttggctgatctctgatttaaagaaaggaggagtcaggcctggcgtggtggctcatgcctgtaatcccagcactttgggaggccgaggcaggcggatcacctgaggttaggagttcgagaccagcctgaccaacatggagaaaccccatctccactaaaaacacaaaaaattaggcgggcgtggtggcacatgcctgtaattccaactactcgggaggctgaggcagaagaatcgcttgaacccgggaggcggaggttgtggtgagtggagattgcgccattgcactccagcctgggcaacaaaagtggaactccatttcaaaaaaaaaaaaaaaaacaactaaaacgacaaagaaagaatggaggggtcacttgttgaatgggtcggtagacgtttcaggtagtttctgatttcaatgatcttaatttaggcagtttgaaaaggtcagtttaaaaaattgaggctgcaaatggtaatttctgaatgagtagagtgaaaccatgggcgttcagagggggagagttggctgtgggataggcatgggggttactatgggatgctttatggaagaggatggtctaaactgttttttaaaagattagttgtgttttaaatgcttgggcatgggagtgggaggtggggagcaagataagaagtgagacaagaaggagaggtctggctggcaatttcggggtgcactcaggtagtgtttgagggagactgctcaggctgtgtgcaggaggatggctgtagcccaggagtgaggggatgggcagccttgtggtggtagctgtgggagtggagaggatggaagagagaagcataggactttggtgttcattggatttggggggtggggagagggagggaaaattcagaaatgtaaagtcttgcaaaatcctgatgttagcgaaaataggaaaatgacatggttgctcattttagatatgtgaattcaaggtgtccaggatatccaagtagaaatttcctgcaggtaactggaggtgttgggcatgaactccagagaagggcaaggatgggaattttggctttagggtacaatcacagagatgacaagctaagcaataggattgctgagaccttggaggaagggagaagaacagatgtccaaaattcccacatttagggagaggaaagaggaactgaaaaggacactgagaggatgcagaaagagaggtaggaagtgaagggggttattttggagccgcggaagttaagggaatccataatattaacaagggagtaatcagtgatgttggatgcctcctagagagaggccactgaatctggatattatagtgctaccaataatttttgagagttcaatttcatgagaatactacagacggaaactgtatttaatcgtacttaaatcctttgtgtttttaagatgttttgttttgaccattaggtgaaggtaactcgtgctgatggcaaccaactgactcttgaagaaagaagaaataatgtagtcataacagtgacacagagaaactatactgagtactggagcggatctaacagtggaaatcagaaaatggaagctgttcagaaaataaattatactgtcccccaaagtggaacttttaagattgaattcccaatcctggaggattccagtgagctacagttgaaggtgccgtctgtttcccatcattgtgtcactgcaacaacaccattacagttgtaatcttgtggtaggcactcaacctgtcagaactgaaagtacataggaagtggacacatgtttctgtttcacaaaatggaggagagtggtaaaagtaatttaatgacagtggctgaaggttagactaaatttttccttgtaagttcattttgaagagcacagtaaaatatagcaatgtgaagatatgatggagaatttcctcaaatccccagtctagtgtttgaggtcagtcatttgaaattttattttggcaggaattgaaatgaaagataaatatatatacatatatatatatacacacatatatatgtatatgtatatgtgtgtgtgtatatatatatatatatattcctttcctgtgttttaaagctatcagtttctttacagtataagctataaaatgatgaaaatccaatgtctggtgaatgtatttttcttgcattaaaaaaaagtgaagatgaatttggtctttaataattgttcagcaggtaacatcttttctcaaggtgttactaaagatgaacatttacagctcctttttcttttattataggcctatttccttggtagtaaaagtagcatggcagttcatagtctgtttaagtctcctagtaagacatacatccaactaaaaacaagagatgaaaatataaaggtaatgcttacaattcacttgagaattacaatataattggactatcttgcttttgatatgtacatattaattaaggtttttttctaggtgggatcgccttttgagttggtggttagtggcaacaaacgattgaaggagttaagctatatggtaatctcttatagaatctaaatttatgatctattatagaatcatctttttattcacttttaagttctggggtacatgtgcaggtttgttatatagctaaactcatgtcatgggggtttgttgtacagattatttcatcacccaggtattaatcctagtacccattagttatttttcctgatcctctccctcctcctaccctccaccctcccataggacccagtgtcggttgttcccctctatgtgtccatgtgttctcatcatttagtgtgcacttataagtgagaatatgtggtatttggttttctgttcctgcattagtttgctaaggatagtggcctccagctccatccatcttcctgcaaaggacatgattttattcttttttatagctgcatagtattccgtagtatatgtgcaccacgttttctttatccagtccacctttgatgggcatttaggttgagaatcatcttaaatggtgtctaccttatatctacactaaacttattaatttttataactcagcctcatacctttttagcctgtcgttttaacattgcaatcaaataaaaaaccttttttatttcttcacctatgtttgcatttccaatttaaaatagataactaaaccttgttttatgtttaaaatttaaatttctatttgataagcaatatatattcattatagaaaattatacaatgtaagaaaaatgaaaaagaaaataaaaagtgctatccatgaccatgtaattttgctaattcagctttcccaatggtgccctgtattccttgcaatcaaaaatagattcttgactatgaagctactgttgctccaatcagtattactttaatcttaccattttctttttctcagtgtatgctctctgtgtttgtcagagaggttttcctgcattccaaaagactttgaagctggtttaattcaagaatttgtgtgtatgcatacaattatgattaatgtagcttcagatgagatcctactaggtttggcaataaattaaacccatctactgttcttttcaggtagtatccaggggacagttggtggctgtaggaaaacaaaattcaacaatgttctctttaacaccagaaaattcttggactccaaaagcctgtgtaattgtgtattatattgaagatgatggggaaattataagtgatgttctaaaaattcctgttcagcttgtttttaaaaataaggtaagatttaaggtaatgatgtttaaaagaaaactttatattagtgaagtctgagaaatgtaatatttctttagaaaagtatcattaagccaaactggttagaaatttatattattctatttctagaactatggttaaacttttcaatatttagcattacatatatattttcacttgtggagttattggggattgatagtctatttgtaaactatggttctggtctttaagactttaactcagatcatgaagctgtttcagaatttttcaaatggttgaattaatattgctcaggagtgaaattccagtggtaacatagaattcgtgtggtgttgatattgcagtgatataaagggtgtgggaaggagtgaggccatctaggataatacgtagaagcagagctgggctttcattaatctatttaattagctggaaactagcccagggcaacttttcaatgagcttgattaccctgcatgtgaggatctgtgtggagtctggtctccaagtgcaccagtgccttttatagcctaatgtgaccagcttgagtaggaaatccctttggaccccagctctgaaaagaaacctgattgcatcatctcatgtatataagaatgagccattgctgtcactaacaactgctgccctctccatcctcttatgtaaaaaattattcctttaaatagtgatttgcagagtatggttcttctatttctttttcctttatttgttaaaatatttgagaagtaacagtagtgatctgtactttcttttttaaaatttgtatttatttattttttgagactaggttataagactggctaatttttgtattttcggtagagagagggttttgccatgttgctcaggttggtctctaactcctgggctcaggagatccacctgcctcagcctctcaaggtgccgggattacagacatgagccactgcgccaggcctgtactttagttttgttgagaattattactctcactttgattgttaaaatataatacaaacttctatttttttagcttatgaaaagagttcttaaaaagataacactgtgttttgttagtggtagagcacaatttttgacttctagtgatcctagtaattgcctgacaaaggtgaattttaaagtagaagttatggaggcttaaacatctcagaaagcaagaccaggttctaaagctggttacagtgtaaaagatcacggactttgaggaagcagagtatatgaatagcatactttcaagtaatttcttagctataagagaaaggaattagtttcagttccatttgcaactatatatctttctcttatttttatgtgataatcatcacatttataaagaaacaacataattagaaatggaatatgtctaagcaagagaaagttagtgaatgtttattaatgttcagtaatgactatggaataaataaatgagctgtaggagcggcaagagatttaggtttagaaatcatccacacagaagtgcaagttgaagccatggggctctgaggtacagagtatagagtgagaagtacaaggtctaagactgagtcttgaacatgctgctccctctcccccatgctttagtgtgtaggtggagaaagtaacctacatacagtggtttgagaggcatgtcagaaaaaaattgcactggacaagttaaacaggtaaggaaggctttattcaagactattgcaatggaagagagagatgataaactcaactctgctgaaacaaaaggcagaagagtttttaagcactggggtgaactcatatgaaagtgctggaggacattgttgggaggttggtcaatgtgattaggtagtctgtgtttgctaattagtacttactgaagttaggtttccaccctcccacagagaatgagatcaattgggactctgtctttcttgatgattatacttcaaagggatggctctgaggaccttgagaaagacatgcctgggttgtaaaactggccagaggctgggaaaagatttacatctcagagagttggagaaagaatttataattgcatgttttctaaaataaatgctctaagaaaagggagctcaggggcttatagttaggaagaagcctgtctttgtaaagtcgagtcaacttgaggggaatgttaaggccctctttgtcaggcattataatcattggcacagcagaatgttgagatagagctagatgaaatgaaaattcccagcaggggccaggcactgtggctcacgcctgtaatcccagcactttgggaggccgaggcaggcggatcacctgtggtcaggagttggagaccagcctggccaacatggtgaaaccctgtctctactaaaaaagttacaaaaattagccgggcatggtggtgggcgcctgtaatcccagctacttgggaggctgaggcaggagaatcacttgaacccaggaggcaaaggttgcagtgagccgagattgtgccattgtactctagcctgggcaacaagagggaaactccatctcaaaaacaaaaaaagaaaatgcccagtaggcaggggcctcatgacaaggccatttggttcagcggtgatgcgatgactgatgctctttataaagtattagtaggtccaggaccatgctttcctgagggtaatggtgaggaagtttagaaggccatggagacagagcatgagggcctggactagtgtttgctctaaccacccactcccttggaaaggccacccctcaccctcagtccaggtggttctatgagtccccgaggagctctccttgccttcacttctgagctcacgtcaccaacatgtaggcatctgcagtttctttcctctttcgtgtttctcctttgtatactggccttccccaggtatgctagacactgctgtcttctactcagcactggctgggatctgaggggtgggagatggagaaagggaagaaaaaagatacagaattaaagaataattcagatttataccactgtgagaagttctatgacttgcaaacactctgggcgtagtttttttattcctttccctagagaagggttatgcatggttttagaattatccctgagccaaggcaaatgtagaatctttgctatattttgggccagtggtctgctattggcaagaatatgctttaaaaaagtgaaataagttaatcctcctttctctcttttttagataaagctatattggagtaaagtgaaagctgaaccatctgagaaagtctctcttaggatctctgtgacacagcctgactccatagttgggattgtagctgttgacaaaagtgtgaatctgatgaatgcctctaatgatattacaatggaaaatgtgagtttagctattttttcattatgaaaatatgtattacaagagaaagaggaaactttattgtactactttaaatatttaaagaaaatttcattagttcctttgcatgtgtaagtcaataattagtaaagcttccaaataaaaagtaatctgtatcgtaatggttatgttggaaagaagcttatgtggttaagtgtccttgctctctttcatcagaattatcacctaaagttagatgggaggaataaattctggaggtctgtggtacaacatggtgactgtagttaatgataatgtaccatatacttgaaaattgctaaaagagtagatttgaaatgttctcaccacaaaaaatgatcagtatgtagtatgcaaggtgatagatatgttaattagcttaatcattccacagtatatacaaatatcaatatatcacattgtactccataaatatatacaataaaaaatgccacctatagttttccttcattttcatactacattttaagacactcaagaaagtactaggaaattgacttgcattattctgggttacgttggataagagagctttagataatttttgaagtgtgttctattttggttatacgtaatggttataaataattacagcacccattgtgccgggcatggtggctcatgcctgtaatctcagcactttgggaggccgaggtgggtggatcacgaggtcaggagatcgagaccatcttggctaacatggtgaaaccccatctctactaaaaatacaaaaaattagccgggcgcggtggcgggcgcctgtagtcccagctactcgggaggctgaggcaggagaatggcatgaatcccaggaggcggagcttgcagcgagcagaaatcgtgccactgcactccagcctgggtgacagagcaagactctgtctcaaaaaaaaaaaaaaaaaaaaaaaaaattacagttcccattgaatcaggaatttgcagtatattgagggggtgaaatcatgttactctgcagaaaacttacaaaccaagaagtatatgaacatctagcattgcataaatgaatcccatattcattagtcatttgatttttatttatatgtccttgatatattcttgtgtaccattgtcagttgtaaactagattgtataatttttgtctattaatggattcagtagagtgattaacaatacatcagaaagaaaactatatatagttgggttgatttggtcattatattgtaaaatttagtttacttcagaaaaattgtacattttcttcagtctacacaactatttttttcaatcttttcttttttttgaaaactttttttttttttacaaccagttggtcatttttctctctttgacttttcctgagttcacattagttttatgtctgtagatcttgcatttgatttaactgaatataatagtatctgttattttatagctttctaaatatcttggtaaatatattatttcattttttcttccctacatatgtgtatgtttgtgtgtgtgtacgtgtgtgtatacatacacatacacacacaccccatctgatgtgctgcgcactctgtctctatttacatttatatatgtgtgttatatatatatttacaagtatatttatatatacatataatatatgcatatttacattaaattttttcagatattaagattgctttctcagctttcttttggttcatattttcctggtgtatttttacatttcttattttcaaccttttgtaaatttttaagtgtatcttttaaatagcatattattatattttgcttttgtttttcaatctaatctaatagtcaacatcttttaataagcttttatttaatccacttataagtatggtaattctttttctaatggggactttttctgcttttctatattttaaaatttagattctttttctgtgggctagattaaatttgttttggtgatttagaagttatgcgttctatttttgttactctgttagttacaaactgtacccatattaatttatccttgttggtttctaaaggttatcagtatttgaatcttctagtatgctcctattccttttggtctctacctctgtctcctccttctcctcctaccctggccagatcattttgctcgtgtacagattttagttccatgttaccatagattgcctttcaatctatgctgttctttcattttttaattgtggaaatctgtgttgattatttcttcctccccattttattttttctctccttctgggacttttgtttttcagaaattggcacttttacttcctccttcacatctcttagttttttgttttatgttttctatctctttgtcttttctgtgtttctctgggagagttcttcagtcaactcagcttagtgatcattcattagctgtattttaatctactttaatctctcatattgtgtcttttatgtcagctattatgtttttaatatctattatttttcctttgtttcttgtttttgttttatattctgatatttcccattatctccttgtgtatatttgctatgcgtattttaaattattgaattgaacttttcagtaattttgtgtcacatgctatatgttgtttagttggatgtcttacttctacagtatttatactctttggaagtctagctgatttggcagattctctgataatatctattggtgaaggctgagcataaggttccaatctgtgtaagtcctatgaccccttcctgaggggagaggactagcctcatggactagagaattactcttgatcctttctgctgcttgcctctattcagtgtttcactcttaaacccttggggaaaagagcaccagtaagagaaggtctcctgaggttatgattcaccagccctgagggtttggaggaggaggagaggaagagtgaatgcttgagggacatgggtctgtctgcatgttttcttcactttcccacactagaaaggcagaggtgctgacctggtattatcttttggatacttgcacaggccgtctgagctgctactgctgttgattttggcagtgaagttgccaggactgtgtgtcctgaggctaccccctggagggaaataagagcaaagtttaaaaacctctcctccagcctgttttctgactatgtctgctgctgtgtctagctgccttctgccttagactgaagcgatgcactttctcccaagaccaattcaagatgtccaccactcttcctggggttttctcactgtgcacgttaaagttttctgcttgcttttattgtttctccagttggttctggaggagggagtgaggatcctgtcatagtagactgttttggcttcttttttttttttgttaaatttatatgtgttgtcaatagcctcttgaatgccttggaataatttcagtatgtggatcttccaggaataatttttagacattagccttcttttcgttagcctatgctgcagctttgacagtgctttgtttattgagccagtgagaacaggaagatttctttatgagatagatgctgcttttgctttttttaaaataaattttattgtgtatatttgaggttatgtgtatatatatatatgtatatatgtatatatgaggttattgtgtatacatgaggttatggaatacatataggcagtatagtggttactgtagtgaagcaaatttacatatttatcattttgcatagctacatttttgtgacaaaagcagttaaaatcgatttaatgaaaactccaaatatcatacaattctattaactatatctctcatgttgtagattatataactgcattttttcatcccacatatctgctattttgtatcccttgacctctatattcccattttcttcttcctttccccctcgcccctgtaaccatcatttgtttatctatttatttatttaaacttttaagttcagggatacatgtgcaggtttgttacataggcaaccttgtgtcataggggtttgttgtacagattatttcattactcaggtatgaagtccagtacccattagttatttttcatgatcctctccctgctcccaccctccaccctctgacaatctctactgtgtgttgttcctctctatgtgtccatgtgttctcatcatttaactcccacttataagtgagaacatgtggtatttggttttctgttcctgagttagtttgctaaggataatgacctccagctccatccatgtacctgcaaaggagatgatcttgttctttatggctgcctagtattccatggtgtacatgtaccacattttctttatccagtctatcattgacggacatttagtttgattccatgtctttgcttttgtgaatagtgctgcaatgaacatatgcatgcatacatctttataatagaattatttatattcctttggatatatacccaataatgggattgctagtattgaaatggtgtttctgtcttaagtctttgaggaattgtcacattgtcttgtacaatggctgaattaattaacactcctaccgacagtgtataagtgttccttttctctacaacctctccagcatctgttatttttttgacttttaaatgatagctatccattctgactggtgtgagatggtatctcattgtgtgtttttattttattttatttttttgagacaaagtctcactctgttgctcaggctggagtgcggtggtgtgatctcggctcactgcaacctctgcctcccaggttcaagtaattctcctgcctcagcctcccgagtagctgggactacaggtgtcgcctccacgcctggctaatttttaaacttttttagtagagaaggggtttcaccatattggcctggctggtctcaaactcctgaccttgtgatccatctcccttggcctcctaaagtgctgggattgcaggcgtgagccaccacgcaagtggccttttttttttttttttttttttttgacagagccttgatctgtcacccaggctggagtgcagtgatgtgatcttggctcactgcaaccttcaccttctgggttcaagcgattctcctgcctcagcctcccaagtagctgggattacaggcgtgagccaccatacccagctgatttttgtattttaatagagacagggtttcaccatgttggacaggctggtttcaaactcctgatctcaagtgatcctcctgctttggcctcccaaagtgctggggttacagatgtgagcactgtgcctggtggcctccttatggttctgatttgcatttctctaatgatcagtgatgttgagctttttctcatatgattgtaggcctcatgtatgcatgtatgacttcttttgaaaagtgtctgttcatatcctttgcccattttttttttttttttttttgagatggagtttcccccttgttgcccacgctgcaacctccacctcccgggttcaagtgattctcctgcctcagcctcccaagtagctggaattacaggcatgtgccaccatgcttgctaattttgtattttttagtagagatggggtttcttcatgttggtcagcctggtcttgaaaactcttgatctcaggtgatctgcctaccttggcctcccaaagtgctgggattagaggcatgagccactgtgcctggcccctttgctggcttaaaaaaattttttttttcttgtaaatttgtttaagttccttatagatgctggatattagatctttgtcagatgcacagtttgcaaaaattttctcccattttgtaggttgtttactgtgttgatagtttctttcactgtgcagatctctttcatttaatttgatcccatttgtcaatttttgcttttgttgcaattgcttttgaaatctttggctgttcctatgtcctgaatggtattgcctaggttgtcttccagggtttttatagttttgggttttacatttaagtttttaatccatcttgcgttaatttttgtatatgatgtaaggaaggggtccagtttcagtcttctgcatatggctagccagctctcccagcaccatttattgaataggaaatcctttccccattgcttgtttttgtcagatttgttgaagatcagatagttgtagatgtgcagtcttatttctgggttctctattctgttccattggtctatgtgtctgtttttgtgtgagtaccatgctgttttggttactatagccttgtagtacagtttgaactctggtagcatgatgcctccagctttgttctttttgcttaggattgtcttggctatacgagctcttttttggttccatatgaattttaaaatagttttctctcgttctgtgaagaatgtagtagtttaataggaatagcattgaatacataaattgctttgggcagtatggccattttaacaatattgattcttcctatccatgagcatgggatgttttcccattggtttgttcatctatgatttctttgagcagtggtttgtagttctccttgtagagatcttttacctccctagttagctgtgttcttaagtattttatctttctgtggcagttgtgaatgggagtttatttctgatttggctctctgctgtgtgttgttggtgtataggaatgctagtgattttcacacatcgaggctttcctgaagttgtttatcggtttaagaaacttttgggctgagactatggggttttctagatataggattatgtcatctgcaaacagggatagtttgacttcctctcttcctatttggatgccctttgtttcattttttctttctttcttttgcctgattgccctggccagaacttctagtactatgttgaataggagcggtgagagagggcattcttgtcttgtgctgataaccactgtttagatgctgcttcttgaattggtgtctgagcaagagcggaagcaaatcttcatgtatttgtattttgtgacagagttggagtcatggaactctagccttttctctccaatatgcctggctctggctcccttgtctacttgccagcttcttgacacattatgaattttttttcttattttattgttttcttattggtgcctgttctagttgcttactgtggatgcagccatggttgttgttagcattgcagaaatagtggttgcaggtgtttaattttatgctggaatgtgtttttttcaacttagttttttttgtgatttttaattctgactttgtcttaatttgtctggttaatgtaaatttttagggagaagtatcaaaattattacctaaaaaggtataatacttgatttttattgaagttaaatatatataaaataaaatttgctatttttaccattttaagtgtttaattcagtgacattaattacttcacaatgttatatgaccatcaccaatatttccaaaacattttcatggctccagacagagactctgtaatcattaagcaataactactcatttccccttccccacagcccttgggaacctctagtctacttctgtctttatgaatttacctattctagatatttcacatttatataatatttgcccttttgtgtctggcttatttcacttagcacagtgttttcaagattattccatgttgtagcatgtatcagagcttcatttctttttttttttttgagacggagtcttgctctgttacccaggctggagtgcaatagcgcgatcttggctcactgcaacctccgcctcccgggttcaaaccattctccttcctcagcctcccgagtagttgggactacaggcgcccaccactacgcccagctaattttttgtatttttagtagagacggggtttcactatgttggccaggctggtctcaaactcctgacctcatgatccgcccgcctcggcctcccaaagtgctgggattacaggtgtgagccaccgcacctagcctcagagcttcatttctttttacggctgaataatattgtgttgtgtatatataccacattttgtttatccatttttctgctgatggacacaggttgtttccacctttttggctactgtaactattgctgcaatgaacggtggcatacaagtatctcttggagttactgttttcagtccttttgtgtatatacctaggagtggaattactgggtcatattctaattctatgttaattttttgaggatctgacagttttactcttttagcctgttttacccactcttgctagcaatgagtactattcttaaaaaaaaaagcattgctaatggggtacatgcaaatatctcatttttgaaaaaaccgtatctcatggatgttgtcatttgcattgctttgattatcagtgaggctgaatatttttctgcttattaataacttatatttctacttttgtaaattgcctcttcagtttttttttttttttgtaaatttaggtcactgacattttgcagagtttatattaatctccaacaaagttaacctgtttatctctgccaaaagtgtgggtcatttttaatgctgacctctgcctgttggtcttgtcaaacagtaacatctaagttctccctggcagaactcaagtccagacttcttaggaactctggattgctgaacagagtaaaagtaagtataagtaagaaatgtaattttggctgactgactgatgaacaaagcaattacatattcattactcctcaatttgtgtcattttcaaagttgataaacatgaaggctaagtcttatctaagttacttggaagaagtgtggaaagttgttatgaatccattcattccgtatattttatcttctccttaggtggtccatgagttggaactttataacacaggatattatttaggcatgttcatgaattcttttgcagtctttcaggtatgttttgcttgctatattgaaaagatattaatattttttactattgcaaaccctttcagaattagtgatcattttgagatgttaaccttttattaaatgtgtcactgaagcgcagtcttatgtaagtataatttgaaatgaaaagataatcatctttccagttttaaaagcaaatggaacaattcaccattggaaaagttaatggaattgacattaaacaaataatttttcctttatgtatatgtatttccatataaatatattttatgtatatatataatatataaatatattttatgtatatatataatatataaatatattttatgtatatatataatatataaatatattttatatatatttccttgactttgaaatggctcttatgcatgagtgtgtgtgtgtatgtgtgtgtgtgtaagactgatgtgtgtatgtgtgtttgagaaagatcaatgtgtatgtgcgtgtgtgtgtttgagagagatcgatatgtgtatgcgtgtgtgtgtgtgtttgagtgagaaagatcgatgggcatgtgcgtgtgtgtgtttgagtgagaaaggttgatgtgtgtgtgcgtgtgtgtgtgtgtttgagtgagagacagaaaggttgaatgtatgtgcatgtgtatacctaagctctcaaaaatgagcacaagtgagtcaggagtttgggagactgccttgataatttagtgagcatttaaacttgtgttttaaaagaaaataaaaattattctttttaggaatgtggactctgggtattgacagatgcaaacctcacgaaggattatattgatggtgtttgtaagtaatacatggcgacatgcttgtatttgtctttcacatgatattcaacattacttatataggtatggatattttttagatgaacatagagattgtgattttcatttttttgttctcttctcccaaaatgtttggagtttaatgtacttagaagtacatctgggccatgacatggaacgttcatctgagctcctgtctagatatttgaagtgaatgctttcctttttctctaggtaattctttgaggtagttatatttttggacatactggaagctgcttttcttctgatttgtatcacaaactgtcctattcttttggaattatttaaaaggagcaacatatttttgaaatatttttgtactccagctttttgatgttcacctagaaaatagcccagatgccatcatgccataaagtattctggtacacacacacacacacacacacagacacagacacacacacacacacagagacatagacacacacgcagacacacacacacacacacacccctcatcaatctgagttcttcctgggcaggattatatctgtacatcctagtttcttgaattgccaaatagagttggctgccaagtaataataagtgtgcttttagaaagacgtcataaaatgttttgactgaaggaaatgtataaatgtataaattagaatggttaaccttagaagggattctcttttctttcaggttaagttatactaacatcatcttgaaaggcttctagaactgtcacagtttctatccctgaattccctgtttctgtcaggtattctgttattccatgctaagcccccgggtctctttgggctggttcttgccccaacaggacacctgatcctctgtcctgaaacttaaaagataattttatagtcttgaagatgttatgaagtcattatgatctctctacattaaagacatgtggtacatttagctttcctcatataaccctctatcctagacaatcttccaagcatgtttttccatttttcagtctcagtttttacccatctttgttcttttttacatattgaatccttcttgatgcccactgtaatacccattctattgccagtaatacttactgtatcctttaccttttctgaaaaccttcttctaccttttcactgtaacagaaggaacctgatactctcactggcacattatgtctctggacacctcaagtgattgacattcattttgtatgtggagtttacaattcattctctccagtgactgtttttctaactactgtcaatgtttatttatagatgacaatgcagaatatgctgagaggtttatggaggaaaatgaaggacatattgtagatattcatgacttttctttgggtagcagtccacatgtccgaaagcattttccagagacttggatttggctagacaccaacatggggtaaaaatttataaagttctttgcccatacatattttgtttagtgtttgttttaaataagctttgcccgctttctaatgtttaagtacaaacatagtgtaactaagaactaagtagaccaaaaggattttttaggaaatgatatttattgaatctaaatacagtttttgataaagccacacataaattatggcaggaaggtctcatcaatgagaagataggcctttttttttttttttaactgaagggtgattttgacttccttgaagtctcatgattcttgttgaagaaaaattgctgggagtacatttgttgtcacaggatgggaagcactcatgattacctcctgtgacccctggcagtgctgctaactgaaccctgctcctcacaaagcattcccaggagtcacagggagaaggggcatgggtggtggaaagaattcagcttggctgataaaccccgtaccacctggcctgataattgagcaggtaaatcatgaaatccacatagtattttatagtcagctgtttaaagatacttgagttaacacatgagtgaaatctcaaggaaacaaataacagcattgacagggatacagagaaaaacttctgcaaatttagagaaaaaattggagttaagtttgaaaatgtgtatttattatctataaaaaatttgtgaaaaaataatgtttattctgaagatgtaaattttgcaggaagattttattagaatatggatcaatatgcagtattatgaccttatgatgacctattctttgaaaagttgggatttactgttttatacttaaaccttttaaatggttttaaattcagatatgtaaacaataggaaaaattgaaattcttccaaaaatagtttagattattttggcttatttcaaaatgtatcagttcttggttttgtgatgtttatatttattatcttgacttcagttacaggatttaccaagaatttgaagtaactgtacctgattctatcacttcttgggtggctactggttttgtgatctctgaggacctgggtcttggactaacaactactccagtggaggtattgtattaaagagctgcttatcagtattacggtgacattaagctaatacagcgtcagctcctcaattttttttttaaatgactgcttataatgtttatcacagtttagagattccttggctttgtcttttggtttttatctgttttatatttaagaatgtgagctatatatagctatataaactgctaaatgtgcaaagtccgtattaagatttgggtagaaaagtttattattgacctgaactaaccatctccaaaggccagaagagagagaaagaaaaagagagagagagaaagaggagaggagagagagagtgagtctttctatttgtcctcttcaagaatgaacagaacttctcaagatgttccctagccaatattccatcatgtcttttggtcaaattgcatcatatattgtttcctaagccagtcactggcaggaggaatataatgaccatgagtggcctgaattttctcatttgaaattgaaatgtaattttgatttacaaaataatcgtattcatgaaaaatacagtgtagattgaaaaatgctttgggtttatatagaaattggaattagattgtaagctcaggccactataaacagacaattcagcaacatgaatgtctgaagggacattcaagaatcattaggaacatggggcaatttttcattgtctggggctgtcctgagtattgcagactgtcacccactaactacctatagcaccttcgagtcatggtgacaatctaagacaccttcacaaatgtgcagataaactctagagggagttactgctgccagcaaaaccactggcctaaactaacccaggtttagctttagatgcaggtgtggggcttggccttttctgtaggacttggccaacaatatcagaattgggtcactgaggaggaagcacatgtattcagatgtcccacacattttctcatctgtatgtaaaaataaatcatatatatgttttagaaataatttccaatttcctctttaaatttagtcaggaagcacatgtattcagatgtcccacactagaacaggggctgttggatttggcagggcttttaaagcagattggtggagtcaatacagcatgaaagaagagcaaattgcttcgggattagacaggctgggttctagttctggctcctctacttgccagcaatatgaatttgtactagttacaaaaatctcaaaaatttaattttcttttctataaactaggagactaacagtaaccttatggggttgtaataaccaaacaaaataatttatgtgaagtgtttggttgctataaggcacttaataaagtatagcaattattatgttaagtaacataaatcaagtcaatttgccgtcattcatttgtgataagttgctgtttgctttctgttgatagcaagttgacatttctagctgaagttaaaagcttcacaggttttataaagattgcatttaattgcataaaatgtgaagaattttgacctgaataaaaatatgtactcgttgtgttctttccagctccaagccttccaaccatttttcatttttttgaatcttccctactctgttatcagaggtgaagaatttgctttggaaataactatattcaattatttgaaagatgccactgaggtaatgtattcaagcttttgttgatcatttacactacaggagaaaatcgaggtagcatgaagggattgggttgtgtagtatctgggcatttgggattctaagcactttatacatttctgggaggctgaaaatagacatgtcttgtcagtgatttcttctgctaattaatgtctaaggatatcattagcatgtctacacattacctccttgaattttcagcataggttttcctcttttgccatgtaagttccttattgtctctgaagcatgcctttctctttcctgcctccctgcattttcccctggttttccccacatctagaatgtgtggccacttctcactgccactctgtgcccactgcagttttgttttttttttttttttgagacatggtcttgctctgttgcccaggctggagtgcagtggcgtgatctcggctcactgcaacttccacctcacaggttcaagtgattctcctgcctcagcctccgagtagctgggattacaagggtgcaccaccacgcccagctaatttttgtgtttttcatagagacagagtgttgccatgttggccaggcgggtcttgatcaagtgatctgcctgccttggcctcccaaagtactggcattacaggcatgagccactgcacccgactgccattctgttatgtttgtagcccccatgtttatattttcaaggattcactattggattcacgtaccttgtatctccttagctagtcatttccctgggaggcaggaattaggttcactgtttgtgttgtgcccacagtatgttaaccaagtgactgatttttcttcccccagaataagtagagatacgtaattaactttattacatggatgaaaatgacatgatatctttaggcactttatatataattttttttaatttaaattttaattttttaagctttttattggcatatttggctgacaaagtgggaagtaaatttttttaattttttaattttactttttaacccagttatcatggtaccatgtaacaagcaaaagatctagagtctaaaggcctggattcaatgtttaatctaccacttaccagcaaatgacttaattgtagtttcctcatctgtaaaatggaaatgataattattacacccacaaaagataccttgagaagcagatgaaaacatcaatgggaaaataattcgtaaaatttaaggcctagataaatgctattattgatgagacttgcaactttgggataatttacaaaagtttacaaccaagatatgcttcaggactaatatctgagttgtactttccttggaataattttttacagagacttcaataaattcaataacatttcatgctgttttcttcaaatttttctaatgagaccagtatgttccaggatgacatagttaaatcaagctagtagtaatatcaatatatgaaatagcctttctgtgcacatccttaccatctaatggcttcagatagtgagagaatttaaagttagtgggaggactagaaatggggctgaagatcgccctttccccatgtatcttgaggttgaggggaaagcatagaaaagaaatgaagtttttcctgatactctttgatactctccttggtcgaatctttgtctcatcttttcgctagtcttgagcctcacagatttgacagtacttaaactggtgataaaagagcactttactgaagagcatctattatacaaaagctttgatttatttttttctttcaggttaaggtaatcattgagaaaagtgacaaatttgatattctaatgacttcaaatgaaataaatgccacaggccaccagcagacccttctggttcccagtgaggatggggcaactgttctttttcccatcaggccaacacatctgggagaaattcctatcacagtcacagctctttcacccactgcttctgatgctgtcacccagatgattttagtaaaggtaaatatttgatgtctgaaagaagtgaaatggaaatacgtaattaaaaaggaagcagaaggttttttctcttggttaaatttgttggcatatctagtaggtcatcttctttacccttctggtaatgcctaatcactttctaatctgtatgtaaaaataaatcatttagaaataattgccaatttcctctttaaatttagtcaggaatgtgactataaagactaacgtctcttttgcagtcatttacatctacagactgtgttacgttgggatcctattaaaacacggccaagtcgatttgtagatttggaattttggaatttttcagtgaaggtaaaagagattttgtagatttttttcagagaagacattctagacagaaagataatgagcatagtggataaacacttgtattctggggtgaggcaaccctgtgtttgaatctcagctctgccaagtgtgattttgaacaaggcatttaatctccccctctttggataataataggaactacctcaaagggtttttttccttacattttcatcttcttctttgtcattttcaaggccagtccatgagatgccttatctaatttaactagaacttactaacagatttgaagtaagaataacaaaatggtacgcgctgtgtcatcagatttaattcatttccatggaaatggtgcctattaagtgtaaatcctgtgaaaaacacgtttcagttaatgaagggtactgtacttagtgagaaaatctaaaaggaaaaattaatcaaagttatggtaattttttgtaatacagactaacaagaaaaactcattctgtgaaatgaatgtattacttgtttaaataaaatatctaatttaaagaaaacaaaataagaaatgataggtgcctatttagccacacacaaacctcagacacaacaggtcagatgtttgtgctcatatctgcgtatagttctctgtaaacatgtgagtagagaccatgttaattgtgttcatttttttcaacaggctgaaggaatagaaaaatcatattcacaatccatcttattagacttgactgacaataggctacagagtaccctgaaaactttgagtttctcatttcctcctaatacagtgactggcagtgaaagagttcagatcactgcaattggtaagaatagagtatatcaccatctattggtttaattgtatatgatcatatatgttgttcttgtaattatagatgtattttcttattgagtcctaataagaagagatggcaaaagtttttaattgggcccaacaactcattataatatgaaggctagcaaattatgtatcctaaaactgttctcaatcttcaatgtgcataagaatcacctgggagtcttgtttaaaagcaaattctggtttagtaggtctggagtggggcctgggaatctgcttttctaacaagctcctaggtgttggtgatactctggcttgtagaccacactttgagtagcaaggcctcactatactgtggctggagggagggttcattcctaagagcagagcttctggcttctgtggctctccaccactggtgaatatcagaatcttctaaggagctctgtaaatacagaaacatctgggttctactctaaacctactaagtcagaatcacttgggctatggcttggtcatgtatatcttaaaaaactttcacaagtgattctgataaccaaaggttgagtactcctccctagggcagttctctgtgcaggatatgagtaacctttacagtaggaagttactcactgacttcggtcgcctctcctagttactttccataacataatagtacttttcaaaaattggcaatttataattgtataaatttatgggatacaaagtgatattatggcttatgaatgcaatgtggaataactaaatcaagctggttgacgtagtcatcacctcaaatacttaactgtttttttttgtgggaagaacatttgaaatttgctgtctgagcattttttttttttgaggcggagtctcgctctgtcgcccaggctggagtgcagtggcgcgaacttggctcactgcaagctctgcttcccaggttcacgccattctcctgccacagcctcccgagtagttgggactacaggcacccgccaccatgcctggctaattttttttttttgtattttttagtagagatggggtttcaccatgttagccaggatggtctccatctcctgacttcatgatccacccgcctcggcctcccaaagtgctgggattacaggcgtgagccaccgcgcccggccttttttttttttttttcctttgatggagtcttgctctgtctcccaggctagagtgcagtggcaggatcttggctcactgcaacctctgcctcttggggttcaagcgagtctcctgcctcagcctcctgagtagctggaattacaggcacgtgccaccacacccagctagtttttgtagttttagtagagatgggcttttgcagtgttggccaggctggtctcgaacccctgacccaaagtgctgggattacaggtgtgagccatggcactcagcctttcttagcaatttggaaatttacaatactcttgttattaactatatttaccatgctaaaagtcctttttttttttttgagatggagtctttctctgtagcccaggctggagtgcagtggtgtgatctcggtttactgcaaccaccgcctactgggtttaagcagttcttataccttggcctcctatgaagatgggactacaggtgtgtgccaccatgcccggctaattttttatattttcattagagacgggatttcaccatgttggccaggctggtctcaaacccctcacctcaggtgatccacccacctcagcctcccaaagtgccaggattacaggcatgagccattgcgcccagcctaaaagtactttttaattagacatagtgtctacacaaatggtgttattaatcagggttctccagagaaacagaaccaataggagatacttacatataaaaggaggtttattatgaggaattggctcatgcaattatggaggctgagaagtcccatgatctgcttttgcaagctggagacccaggaaggctggtagtactcactctgagtccaaaggcctgtgaagcagaggagctgatgatgtaaatcccagtcctaggagaagatgagatgagatgtctgagctcaagtagtgaggcaggaaaaaaagggtgaattcctccttcctcaagcttttgtctattcaggctgtcagtggattggatggtgcccacacacactggggaggacaatctgctggacccagtccaccaattcaaatgctaatgtcatctagaaacaccctcacagacactcagaagcaatgcttaatctaggcaccccttggctcacttaagttgacacacaaaattaaccctcacaaatggtttgtttatatagttgtgctttacaaataactgaagaaaacattttaattaatgacgtctaatagtttgttaggtctttaaggtgttaggacctaaaacacttttttacagttcttttatatttcactggcagatgtaatgcttttttattataacccaaacaaccaatccataggcagaggactttatttggaggcatatatatacatacatacatatatatatatatatatatatatatatatatatatatatacacacacacacatacatatatatatatatatatatatatatataatttttttttggaagaggcagggtttagctatgtttgccccaggctggacttgaacttcttgaacttctgagctcatgtagtcctcctgcatcagccccttgcataactgggactacaggcatgcaccactgtgcctggccaattcttaaaaggaattaaataagctctctatttaggggaataaattctgcttaagcatctcccacagtgttgggatgctgggacatgcactacacatacatacacacacacacacgcacacatatacacagagggaaggagcctggctttttaaatatgtaccatcactccttacacaggaacgattctgtctgtcgtcatggaaataccccgaggcttaatttttatgcttgatgtaaagaacggattttcaagttttatttttacatgttgttttaaagacctattttgtatcccagaatgtacgaattttagcttgcttctttgaactttgatagtctatgttcactttgaatattaaacacatagcctgcagtggtaataatataacctctatttttttctttgtattcacatctaaaatttaagctatactggcacagcttcagtctattcatatgaaacaggttcttttcccttttttttcatattcattttttaggatcacattttcactaggtatttggacttggcttggtataagttttcaaaataaactacatagaaagatactcttatctatacagcttaacaatggcagggccaaaattagaactcagccttcatatttctgaatttttgctactttccctgagttgtggtgttaggatgtgggtagagggtttttaaagcatgtgttttgtttaattttagattactaactttgaatccttttccgaatccttttgatcctgagattaattgaaatacttatatttgttgttactaaacagaacacattggaaaacactacaatcctcattgtttttttaaaaaattatttctcaagttcttgtggtgtattagtaagaaataagaataaaattttgtttgcgtgaagaatactactaataaaatgtttctttcctgtatgagtgatggtgtcttactgatcaattctgtacatttttttaaagatttttaaaaaaattattttttgcctaatttatgccacatgcttaactgagctaaaaatgtcctctttcatcacatgacctacaagttcagtaccagagcattgttatttttttgaccagtcttcctaaaagcttggtgtaaagttccaactctgttccaagcagtggaataatgatattgcttcaatgacagaggtcttctgtactcagtggaagtctctttgccaccagcaggtcgttgttactgagtatttactgaatgaactgcatgtcttgtgcttccaggagatgttcttggtccttccatcaatggcttagcctcattgattcggatgccttatggctgtggtgaacagaacatgataaattttgctccaaatatttacattttggattatctgactaaaaagaaacaactgacagataatttgaaagaaaaagctctttcatttatgaggcaaggtaagcattttagagacctacatttgttcgtagaaaaaaatttgtttttttcaggtagggttcattctagaccatatttcaaaatagatggattttgtcttaggtaagtgatgggctacacggtgttgacatgtgcaggaagtgcaaacaatggaaagctgttacaattcttcctttagctaactattcactcactgctgctaagatgtttgttagtaatggcttaagagttagtttctggtgggagggcttgtattatactaagggatctgaaatttaaaactctttaaaaatctagaggaatactcattcattttattacacatttgtggagtgtttcttagtgccaggatcagttttcgtgccaagaaaacagagggagccagggcctctcttcttaaagaattcgctgctcaatggagaagatggtttgtatgtaaacagacgcagtgccgtgtggtggggaccttctcagtgcatttaaaatgatgaggaggacctgctggaccctgaggaaatgtcatgctagtgaagactgtatcttgacaccttgaaaggtggaaactgttcacaggcaccagatcctttgttttggcaacttgttaataacagcagctaacatgagttgagtgtgcactgtgtggcaggcagtgttctaaacactttacatctcatacctcattggaggctcaccattagtattagcatgatcctgtttttttgcagatgaggaagctgaggtgcagaaaagttagctaacttgcccagggtcatatagtcatacagagcttggatttggactctgagcctatgctcttgacatccatacctaggaggaaacaaagagatgtgagacacgtttgatgttaatagtaaagtaaatttgattttctgaaatactccaaaagcttaccaaagttacagtctcagttttgtatttccttattagtggacctctagcacaaactctctgtggctgagtttttctctctgcacaatttgtatgatatatcccgtccatcaaattcatgaggattagaagggttcacacaaactgattaaaaatgaggattcactataatctaagagaaatatagttcaacgctttccaactcctaatttttttagtttttgtttttttataacaaatggattaaatgaaaagtaggggcaagctattaattgattgctaatttctccataggagaattagaaaactcagtaaagacgccattgtaatgtgagcttttcttccaggttccattattgtgtagagacctttttattctaaaataattctatgtaatgacagtaataacaactaaatctgtttaaatgttttatgcatgtttcatttaattctcacaaaaactctaggagcaggtgtcctattattatttccattttatagatgaggaaattgaggcacagagaggttaaagaatttacccatggtggtctggttccaccgtccaccttgttcctcagaacactatgggataattctgatttgcagtgttctctggtttttagaagcaatgggatatgatggaaaggaccaggaatcgggacgggatgcttgagtatcaccaccgtgtaagaagtctcactggaggttttgataaaatattaagggaggaacatggggtcctgtagagaaggaggcaccaaaggttagaatatggggtgtcagattagactgaagtaagctgtaaggtgttgggtttaagtagatgagctggagtcagtgtctgaagatctccctgggataggatggcacagacaaaggctgaatgggagtcaaggggttgcgggtcaggaacaatgcagtgtatgagatcacaaaccaagggagaccagcgtttagaatcagggctgagtgtggcctgagttctgatgtggggaaggacatagtggtatattttcccttagattagggccagaccatgcagacactatgaccggccctgaaatgcaccaggtggttaggtcctctgggatatttgtagagatccagcagttggaatttcctgtatagagttgcccatgtaaaattatccctgtttatacacatttgtggattggtcgtgttttaaatatatacgtacaagaataacctttgtcaaattttattataattaaatttaagtggtaccaagtggtctctgtggtatattgtgtgccatgctaaacacaaatgagatctttacacattggcataatggctgtaattaaggagataagtaaaaattatttgggattgtcatgaatgaacgttgtaccttttgaaaacaagattccaatttgtattcaagatttagtttttctggtttgaagtagaaactacataggaattagactggtgctttataatttggcatacattctttgggatagtttaatacaataaggtaaaatatttcagaaaatgccacatataactccatatttacatatgctttatgaactgtaactctggctaatcaaatattaatgctttaaacagaaagcataaattttacatagcttgaaacatgtaagcagtgaaaactcattccttaaaaataatttcagtgtgtgtcctagatacttttgctgtggatcagcagccatcctacaaaatgaatggtccaaatcctcagtatctgttgttttcccaaagcagtgctagtccctcaggtcagtcctggccaggtaggtggccaaactgtagtttttcaaagtaacccagaaagggtctctactgattgcctgagatccctcctcacatctgttggttgttagaaggtacagtggccagagtgcaaaaaaagcatcgttctctaaatgccaagcagtcctcccaagtgttaagaatgccgagcgctacagctgtaagtaggcgagtttccccttgggaggaagtagatcaggggcatagcactggctgtggaggcagtcacacctgggcttgagtcctggctcccaccttggaacaggttcttagtgtctccaaggcttggtttttttacctggaagacagggataataaaagaacccacttagtagggttgtttttaggagtcagtgagaataaaagaacccacgtggtagggttgttttgaggagtcagtgagatatgtcagcattttattcaacacgtagtaagtgcacaacaaatatcagctatagtagaattagttgcctctaactagggagttagaggttaatgtcagtgaataaatcctgtccattctccctctaaaaacctgtatgaaattcttctatttctctccatcccactgctaattgttccattcaagcatgattgctcactggactactccaatggcttcctgactagtctttttctgtgttccctccccttcagtacattctccatataatgtaaaagggatcttagaaaatgtcaagatcctgtcacttgcttgcttatgatcctgcagtgggctcccggcttcagcctacagggtcctgggtgatctggcttggcctccctccttagcctcatctggagctggctgtatctggaacactctgagctccatgctgcttcagggacatgatgctttcccttccttctcctggcatgctttctccctaggtctttccatggctgctccttttcatcattcagttgatgtttgcctcagagtggccttccctgaccacttagtaactccaatttgtactactccattttatttcttcacttaacattatttaaaattatcctgtccatcatctgtcctggcatttagagggggagctctgtgacagtggggaccatgtttgaccttcattgtatagctatgtgggcatctcaataaatccagaatgggcgaataacttattaccaatattaacttttttggactttaggtccatcatcctaatgtggatattgggtccagaagatctctgaagcgcccccacagtgtagcatgatgatctctgggcactaatgggtcgacctggccttggcattctcttagcagctaagaaatgtgaccagtgatttccatgtgctactctttttgctggtgaagtggctggtgaaagtcagcacagtggagctccccaaaaatacatcatctcacatgctgaactaaattatatttcaaagtagtggacgaaagcttcttggtataatgcttttcattatgaaatcagtgtctcatttcagagactctcttttttcttttgccatcacatttgccaaagtcctttaaatatactgtagttgtttttattttttaagaaattaaagtggcttcagcgtgagtcatgattatattatttaaatgtcatttatgaacagcgcattgttttacttaaatcatgcttggcccaggagttctgtaacctaacccattattttgttggtcgaaacaacagctacatcattgaatgaagtgtctttgctgtcaaaaaggaaaatggaaccataacatgaaaactgtttttgataaggactggaaatccagaacctgttaattgaagatttaaaccatttgttttcctcagatatttaaatcacagtgcctgcagttcaactttttaaagtgagactcaaaccaagtctaattgaaaacactatatttcctccattgaaataaaaataagagaaagaaagcttcagaattcggatgttgccattggtcacaagtatggctagtggccatagcttaaaaaactgtgatgttctcactttccatttcatgtcatagaaagtaaacaaattcataatgatttcttttaatacagagaattttttttatcagcttattaccagagaaaattcttgaaatagtcacaaatagccgactttacttcctttatttacatgtaattttgacacgaggtaaatcaagtcaaactatgtttagaatgttactttttcattgtttgtgagcagtatttttatctttattataataaattttgaaattttacattcatggttatcccaaagaaaattcataacccagaacaggatgtgtcttatctggccctttatgaagggctcatgggtttttatcttaagagcctctggacttcttctgcatttcaattttcagaagtctatgaaagttctgagcatatgattacttttcaaactcaagagccattcctaaaatgattaacttaaaggtgatactcttatttcttcataaacttttggagagagctatgtttttgcttttctcgtctgttgtgatgcagagtctccaacttagatgactgcactggaaggctgagttgttgtattaacaacaaacattatagacgagtcatcagtgtcctgtttttttttttttcttttttttgtgatggagtcttgctctgtcatccagtctggagtacagtggtacgatcttggctcactgcaacctccgcctcccaggttcaagcgattctcctgcttcagcctcccgagtagctgggactacaggtgtgtgccaccacacctggctaatttttgtatttttagtagagacgggactttgccgtattagccaggctggtttcaaactcctgtcctcaggtaatccacccgccttggcctcccaaagtgctgggattataggcatgagccactgtgcctggacctgttttgtttatgggatggaaattaggcctgatacactgggacgatttggaggacagtcgagggatccacaatgatgcatgctggtttaagatgaggaaggaaacctcacaggacactcccacaaggagacatacaagttctctccaggttgtgaatttctcccttacttttccatgggagcagagctggtggtttggattctcggtgttatctaagcctgctcaagaaattcactgcaaaactggtgattgtctgtggcctcttctctgggctggctgcctctagtggaagaatggtgctagttgttgatattaatggggaatgttggaggtcagccacctgaggggtaatttccataagcactgatctcatctccatgatctcatctctgaccagtttcacaatatctcatacttggaactgccgttgttgatgtgatctgggggtgtggaggcacatggtcctctccttgaggttggtctttctgtcacaaaagtacctcaaacttttgtgtagggattgagggcctcaaacctattttcttttttcttcttccctctcctctccttctcctctcttctttccttttcctcttttttcttaggttgaattcatagttaaactctggctatctggagaatttagtccttaattaaaaattgagggagaatgtcctggactctcttgctgatttcttttgtgaacattaattattttgcttctctgtgatccctggctgcctctgaaaaatgagataatatactgcatttttaaaggttatgtgaaaactaaaacatgataaaatgaactagagtagtgataatgcctatcatttaattttttccacttttgtttatgttttgaacatgtagaacattaacatgcttccaaaagacaaacttattttgagacatatattcaaaagagtgtctcttcttccccttttctttctccctacctctcattggtaactatatcaggcggttcttgcattactataaagaaatacccgagtctgggtaatttataaggaaagaggtttaattggctcatgattctgcaggctgtgcaggaagcatagcgccggcatttccccctaggaaggtctcaggaagcttacagttgtggcagaaggtgaactgggaacaggcacatcacatggtgaaaacaaggacaagagagacagtgttgtggggaggtgccacacacttttaaatgaccagatcttacagtaactcactcactatctcaaggacagcaccaagatccagtcacctcccactgggccttacctccaacattgaggattataattgaacatgagatttgtgtggggacaaatataccagtaacctacttcattagtttctagactatcttttctctctctccttttgcgaaaataaatgtatacatatatgttttctcatttccccccgcaattttttttttttttttaaagacagggtgtctccctttgcccaggctgaagtgcagtggcacaatcatggttcactgcagccttgacttactgggctcaggtgattctcccacttcagccttctgaacaggtgggactacaggcacatgccaccatgctaattttttttttgtatttttgtagagacaggcttttgtcatattgcccaggctggtctcaaactcctaggctcaagtgatccactcgccttggcctcccaaagtgctgaaccttggcaataggtgaaccttggcgcctcgcctcatttcccctttttattacacagaagatagtatatctatatgtactattttacactttgcctttttcacttaacagtgtatccaggaaattactctgcatcagttgaccgagatattcctcattctttttttcacagctgcatagtactctgtcatgtgtgtgtaccatagtttattcaatcagtctccagttttggggcactaagattgtttccattatgttacaattacagatgatgctgtaatgaataatcttctgcgtatatatttttgtattgttggaggtgtgtcttcagggtagattcctagaactgggattactgggtcagagggtaaagacattcccctacatggtagttgtaaccttctgaattccctctagcagtggatcagtgctggtttccatacagctcacccaacagaaggagtggtcagacttttgaatcttaatgctaatctgatgggagagaaatggtatctcagtgtaggtttaatttgagtttctcctgttatgaagttgaatgtgttttctatattaagatttgtttttatatttttgtcttttgtgacttatctgttttgccttttattcacttatttttatagggctttttatcctttaccctaatttttaaaaagttctttatatatgtatatacatgtaagtaataacatataaacatacataaaaattacataatattgatattagctatttatccatcttatatgttgcaaatatggtcttaatttatttgttaagccttgcttatagtgtgttttgccttggaatagtttaaaaactttaaaaaaatagtcaaatgcatcaatttttttattttattgcatctggtgcttagagagccttcctctacacctatattagagagtaatgcctattgtttgttgagagctttccatgtaaaaggtacttactgaagtcttttcttcttttatcatgtttaataattggaagagctctgtgatttactaggagacagtggccttggagccagtgagaagttggctaatgcccaacttcactccctgttagctgtgtgaccatgcacatggtatctgtatccgctgagtttcagtctcattatctgtgaaaaagggaataataatagcatctatgtcagagggtccttgtgagaattacctgagttaatcctgcaaaggactttgaacagttcctgacatctaatgagtgctgaatgaaagttggctaattactgcaccgtaataattcaattagaaacataaaggtataatctaatgttcccttcttcaaattaagcaaagttttgtcatcactttaaatgtttatatttcttttaccataagtcttaaatatcaccatgaaacagagtatcttgttttctttttttctttatgcattttgttttattgtaacttaaatcagatacttaaatctagggtttcttttggaaagactcagggagaagtttgggacttgaaggtgagaacacattaactgtaatttcaaaccattaatgcttatgtttagttagtcaaatatgaattttacttatagttctggatgcttctaaaatatggtatttataaagtcaaatttgtttattactgcagtttactggggaaggatttcaacatttcacaaatgagtatggttgccaagctttgccatgtctgtgctgcaaagctcaggctgtgtgcccttacctgctaatagtggaattgtgtaatttttagaaggatttttggctatcagagagtcattgataatgccttgagctggaaatgttcctgctaatggttgcttttttagtgataagttattgctatcttaactttatttttagcaagttagtttattgtgggttgtttggtgaatcctttagagtttggcctatgttttctcacactggactttgagatctgtatgcattgctttgcaaatatgaaacatctgctttttatttgcaatcatttatttgtaactatttgcaaatatgacacatttgcttttattaatgcagatacgtgagccttaaccccctacctaatttacttctgtaatgatacttcattgccaccactgagcatgtgtatatgtgtgtgtgtgtgtgtgtgtgtgtgtgtgtgtatatatatatatatatttttttttttttttttttttttagtggaaacatggaattggtgggtaggcaggcaagttggttttttggtttacctcagttggccatggccccaaaatttaagagccaccgttttagattattttgcatttcctcctctgtattgctggtctaagaatagaaaatacttttattttctactttggccttaaacttaaattaatgataccctacatagtatttttcttctgtagcaaacagtgctagatgactaagcattgaaacaattttgatgaacactagacagttaaataaaagtctgcctttaatttgcttgcttttgaatggctagaagcatcatctatgccatagtgatcttttaatttactttaatttgggatatcacaggcttttttttttttttttgagatggaattttatttgctcttgttgcctaggctggagtgcaatgacgcaaatctcggctcactgcaacctctgcttcctgggttcaagcgattctcctgcctcagcctcccgagtagctgggattacaggcatgtgccaccatgcccggctactttttgtatttttaatagagatggggtttcaccatgttggtcaagctggtctcgaagtcctgacttcaggcaatccacctgcttcggcctcccaaagcgctgggattataggtgtgagccactgcacccggctgggatatcacagtttttattttatgcattctgcttgaaaagtcctggcattttaaatttccaacagcacttaaaatagaaagtactcaatattagctcttggtttgatttcttctttccccctctctgcccatatttcctcaatatgaagtcataattagaaactttcatccattgcaagttaatgattactttgactatctgtctatttttgtgtctaggttaccagagagaacttctctatcagagggaagatggctctttcagtgcttttgggaattatgacccttctgggagcacttggtaagtgtttttgccaactgaacaaatccgtgtcatggaatgggctttcactaggtcacaatagccacgaaattgacagatatatctctatatattatagactgggaggttgctttttccttagtctggctttaaaaagagattttctttttaaagtattattttcaaacattaacaaatcaaatgtttttatttagaaaagataagttataaatcctcttttttgtgtgtgtgtgtgtgtggaagaaacagaaataaaaatactttatgatgatggtgcagctgataaaatcagttagaaatgccgggtgattgtgacacagcttttttcttaatcttccatgactaatacaagtgttgtgttactgcggtcaatgtagtttaagtttgtgtgtgtgtgtgtgtgtgtgtaaaaaacaaacactgatggaattaagtatgaacagccagtttcctccagactggaatctctatgtggctgattttggatgattaatctctcttcttgtacttatcttcaatttcctattttactcagaaaaagattgactcactgtatcaatcaggatagactaggagtgctgtggtaacaaccaacctactcaatctaagcaattaacaatgaagggatttcttgttcatgctgcctttccattgtggtcagcagggggctctgcagctgccaacgtgtccacgtctccaaaaggaggctccaggtttgccacagcccggaaagaggaggctggagtctatagcactggcaattagagacttcatcctgagtgtatcatttctactcattttatccttctcagagctggtcacatggctatgcctaacctcactggggcaggaaagtgaattcctctgtgtaaccaaagtaaaagagaactgtatattattgaatatcagtaatgtttaccacatgaaactttatataacatgaaacagatctgcttcaaattttctcttggccttggcctgactcaggatatagaaccataaatagaaagctttcagtgttgtattgcttgatgttctttttacctcagtatagtgttttgtagcagggactggcaaacttttctgtaaagggtcagattgtaagtatttcaggcattttgggccacgtagagtctccgttgcatgctcttccctcttcctccctctcctccctctttctttcctgtctttgtctttttcttttccttcttttaaaacccgctcttaggtggtggtgttggcaggtgggggctgggttggtgcacacataaacaggccctgggctgtatttggcttgagggccagatttgggccaggcagatttggcccacaggctgcagttggctaactcccattctataggagagaaaaatatcattttccccacctgaagtactacagtttgcttgtgaactatgtatgcattcttcacccacagctttggggctgactgaagcgtgttggagctcttctttggtaaatatctagaacagtccaaagatgaataaccttggacaatttatttaactctcttggactgtcagattctcagtctacaaaataatggagctggattcaacagacacattaaaaaatgctcatcatcactggccatcagagaaatgtaaatcaaaaccacaatgagataccatctcacaccagttagaatggcgatcattataaaggcaggaaacaacaggtgctggagaagttgtggagagataggaatacttttacactgttggtgggaccataaactagttcaaccattgtggaagacagtgtggtgattcctcaaggatctagaactagaaataccatttgacccagctgtggggaaaagaaagagagatcagattgttaccgtgtctgtgtagaaagaagtagacataggagactccattttgttctgtactaagaaaaattcttctgccttgagatgctgttaatctgtaaccttacccccaaccctgagctctctgaaacatgtgctgtgtcaactcagggttaaagaattaagtgctgtgctttagatatgcatacacataaacatctcaatgccttaaagagcagtattgctgcccgcatgtcccacctccagccctaaggcaggtttcccctatctcagtagatggaacatacaatcggattttataccgagacattccattgcccagggacgggcaggagacagatgccttcctcttatctcaactgcaaagaggtgttccttctgcttatactaatcctcctcagcacagaccctttacgggtgttgggctgggggacggtcaggtctttcccttcccacgaggccacatttcagactatcacatggggagaaaccttggacaatacctggctttcctaggcagaggtccctgcagccttccgcagtgtttgtgtccctgggtacttgagattagggagtggtgatgactcttaacgagcatgctgccttcaagcatctgtttaacaaggcacatcttacacagcccttaatccatttaaccctgagttgacacagcacatgtttcagagggcacggggttgggggtaaggttacagattaacagcatctcaaggcagaagaatttttcttagtacagaacaaaatggagtctcctatgtctacttctttctacacagacacagcaacaatctgatctctctttcttttccccacacccagccatcccattactgggtatatacccaaaggattataaatcatgctgctataaagacacatgcacacgtatgtttattgcggcactattcacaatagcaaagacttggaaccagcccaaatgtccatcaatgatagactggattaagaaaatgtggcacatatacaccatggaatactatgcagccataaaaaaggatgagttcatgtcctttgtagggacatggatgaagctggaaaccatcattctcagcaaactatcgcaaggacaaaaaaccaaacaccacatgttctcactcataggtggaaattgaacaatgagaacacttggacacaggaaggggaacattacacaccgggacctgttgtggggtggggggatgggggagggatagcattaggagacatacctaatgtaaatgacgcgttaatgggtgcagcacaccaacatggcacatgtacacatatgtaacaaacctgcacgttgtgcacatgtaccctagaacttaaagtataataaataaaaataaaataaaataaaattaaattaaaaaatggagctggattagatcatttctaaattccttttcaaatctgagatttttgagtcaacatggaatttcttggccaagcccaagtggaaaccagttctgcctgctagagagagttgcttaccttgtccctttgctctttcttttttgatttttttctttccttgttccatcttcagtgattccccctttgatgaatcttctgatgggggaaaaagtgttgttgttttgcttgctcggtgttatttggtggaccttataaagtgtattttatgtaatttttttctcttttcataaaggttgtcagcttttgttttaagatgtttccttgaagccgatccttacatagatattgatcagaatgtgttacacagaacatacacttggcttaaaggacatcagaaatccaacggtgaattttgggatccaggaagagtgattcatagtgagcttcaaggtggcaataaaagtccagtaacacttacagcctatattgtaacttctctcctgggatatagaaagtatcaggtatttcgtatttaatttaataaatgatagatgggaaattcaaggaaggtaggtcttaatgggtcaaatatgtgtgtggaaacttaacaagttgcagctttacaacacatgtgaaatctgaatttgagtactcttttgctttgcatttgtggccatgttccaaaatctgagaataaaacattaacccactctttcagaataactaagagaattctaaaaatgctttttaatgtatgtattgtacttgctattggtaagataagtcaatacatgttttatcattgaaaaagttaatttctgaggggaaagaaaattatttaaaatttgacaatgtgttctagcaagtttagattgcaaaggattttttacttataaaacatcatggaacagttacaatatctgttaatttagtgctgagaacacccataccctgaaaagtgtgttgaatgggcatggatgcctggatgagaatgagtatgcgtggaaaggtatgctgacgagcttaagtttgctccagagctgtcctggtgattgatgcctttactgcttactgcctgctgcattttatgagatcaccaaagtcattctctttattaggacccccactattttcctattctactagtaggcatgtagaagctaaacttttcctgaacttagggccgcactaccagagatcaaatataagaaatatatttctcaagcagtttgctgttcttatctgagtctgtgatactgagtgggagaaacactggcaaaagctctacttttttcttctagggaatgacacctgtttacttataaaaactgaaaaacagtattattttcaaaatgcatggcaaatctttaaatgtcaatgatcatggttgattttcattgcctagtacaaggtcaggtacttcatagacactgaacttattttttaaatgcatgtttcaaagtactttttgtttcagtatgtggtaatgggttactctgaatagtaaaaaacatactttttttcttccaagcctaacattgatgtgcaagagtctatccattttttggagtctgaattcagtagaggaatttcagacaattatactctagcccttataacttatgcattgtcatcagtggggagtcctaaagcgaaggaagctttgaatatgctgacttggagagcagaacaagaaggtaatgtgctgggcccacttgaggttgttatgctttatgaaatatataacttacatgagaaaaatttttagccaggtttgaaattgattacatctgcatcttttggtgaaaagtaaaacacataatgagatcaggatgggcctgacatggccacaatgcttctggtctccccagggtttttttaacagaatttcagggctcagatgtctctttattttagatatgtgatgccctatgtcagttaccctttgagtgtctgataccatttctggtttggcagccttgtagtttgctaagaccttgggttctggagagacaggttaaatcctggttctgcaacttacctttatgaggttcagttttcccaactgtaaagtggaaatggcacctattttagagtggctgtgaggattaaatgagataatgtgcaatgctgctgcatagcaaatgctcaaaaataggaactaaaatgctaattaaaagaaatgtgaataccaaaaaatgctgctagtaagtggattatgtgtattttatatacaaagtggacagggatccaggtgtgtgtgtgtgtgtgtgtgtgtgtgtgtgtgtgtgtgtaagaaagagagagatggaagtgggtgggcagaaataagataatgtccagtgattcaaatttctgttaattcaagaagggataattgtagaaagtgtttagaggcttctgagactgtaaaaaatattgtattaacagtaacttagattgaatccttgttacctattccaaagctggggactagaagattattgcttagaggctgaagcagtctttgacattttttcttcttgtctgcttggctaagtggtagttatttaatattccacctaagtgtagtcatcatctaaatagtaatatttgagagagggcaccaagtaggatggtcctctggggactagagcagaattatctctaggaaggttgttgagttagctggggatcctaattttttttcctgggggcttgaacctcaaactgttaacaccaaccttcagataatgaaaatgggagagtccagaatattagagctagttaatggcagattcccagaataggattcttttcaatgtgtcttaaaatattttggggatggcctggtcagataagtaacgtgcattatcttctgaaatatattattttttccttttatttatagctatttagtcttgagccaaatatagggaatttctcataggaaaactattttcatcaaaacatcctcaaatgtaggcaatgggaaaaggatgaaaatttacaagtatataggttgagcatccctaatccaaaaatctgaaatccaaaatgctccaatgagcatttcctttgagtatcatgtcagtgctcaaaaagtttcagatttttgagcatttcagattttggaatgtatgtatgctgtaaatattccaaaaattcaaacaaaacagaaattggacacacttctggccccaagctttttggataagatatacttaacttgtaatagtttaaaaaagcaacatataggcacatgtatacatatgtatgtgtgtgtgtgtttgtgataaataaatacatgtctggcataaataaatacatgtatacaagtatatattttttatgctagttaagtacaacttggaccagagtaggaatatttaatggtataaaatgtaatttttctggataattgatcagaatgttattacttttctcttgcaggtggcatgcaattctgggtgtcatcagagtccaaactttctgactcctggcagccacgctccctggatattgaagttgcagcctatgcactgctctcacacttcttacaatttcagacttctgagggaatcccaattatgaggtggctaagcaggcaaagaaatagcttgggtggttttgcatctactcaggtgagagatgatagttttttccctttaaactataatatataatatagatttatttattatatatattttatatataatatatagtatatattatataaatcatatgttatatataaaaaatatttttaaaagtatgtggttgcattttttccttgatttcataaaattacttggcagtttcaaagtttagtaacttaagcaaaaggctaaattgattaattttaatttttttctcctcattactatgaatttcatgtctgatatttatatggaataaatcagttccccatctgccacttttcatctgtggtaactgatataagagtagatgttcagttccatatagcaaatattttctattttcttttcttctttttggaaaggaaaaactgaaacttttaatttactgataatatgatcatttatgagcaaaattcagtgggatctacagaaatgctactaggattaacaagtgaatttagtaacattgtggtataaaaaaatcattgtacagaaatccattgtatctatatataagcaatggaaatgcaaatcaaaatagcataacatgtgaactgtttagggattaatctgacaaaaatcaataagatctatacactaaaaactataaaacatttcagcaaacattttctgagcctctcctgtactctaggccaaggacattcaaatatgaatcagggagcattccactctgaaggaaggtgtatgaatatccagcaacaaaatactactaaatttactctttgaagaccttgatatatacttatatgtacaaatgtttttcttccctcaacaggataccactgtggctttaaaggctctgtctgaatttgcagccctaatgaatacagaaaggacaaatatccaagtgaccgtgacggggcctagctcaccaagtcctgtaaagtttctgattgacacacacaaccgcttactccttcagacagcagaggtgtgggcaaggggcagttatttaaaaatcagtgtagacaattctttatgctggaatactgctttatttgtaatctgttgatttcaacaaagacttgtttccagagctctgtagagtaatagggagaagtggtgcccttctttggctgaatttgctgagctctggaagggtggggaactttggaaagattggtggaacaggagaaaacacgggcactgtaacattgggaaaggaatgaacatagaaacctgttgagtttctattcttcataggcactgtgctagattactttacgtatgctattgcatttacttctcaaagtaactctaagaagtaagtacatctatccccatcatacatatgataaaactgaggctgagagaggttaagtgacttgctcaagatcatgttactagtaacagtagagctaggatttgaactcatcattccaaagaccatgttcttttcagctgctccacatgtcttcttaggagaattgatagaaccggtagtagaattcttactttaactggaataaaagaatatgctagttcttaactttattcccttgatcagttttgtgggaggttaagtacaatggatgaaggtgataacttcaattctggaaagtgatgaagagtggtgatgataaaggaaaagaaagaataaagttaggcacagtcatagacaatgtgttattgtgttcctgggagagccaggggattaggccctgattaagggaggtcaggggagggagatgactttagtttcttgtcttttatgcttcagccccaacaggaggacagacttgtcagtagcactaatgtgccctcccatgggcagaggtgagggagcttggggagtgtgcacttttcctttcatcaccttgcttacctatttgacccatagcttttgatatgtgagacagtgcaaagctcttagtgctgtcagtgattgcttcttttcctaatgagggataggactgatctgttttgctacttggaaggatctagatatggaaaattagcctcattcactttttttcaccttgattcagcttgctgtggtacagccaacggcagttaatatttccgcaaatggttttggatttgctatttgtcaggtatgtaacgatgcttatttttttaagttaaatatgactttttataataattatttggtttggggctttattaaatcttagataacttgaatataattcctaatgatttacatctgtgacttaagcaagatatatcactgtctttaataaaaagtattagagatgttgccagccaatgagtagagagcaattatatagattgattttctgtttgaaaagtatttcttggagattatttgctttttgaagtgagggttaatgtcctccaatatgattcctgataacaaatacatgttttacttataatttcttaatattcatctgagaatatagaagtcaacatggtagaattattgacttgaggggaggaattgtgtccctttaatgtaaaatcttatataatagtaaatataacaattaaagcataattatgctcaatcctctggtacagaaagaaaatataaagaaatctacatttttatagtgcagcaggagctacaataaaatggaagtagtatgaaaaatactgaataagataatcatcacactaaatagcacataaaaatattgaggactttaagatcatctcattagaacccaaagataatttgtgataggaccaaaaatggttgtgtgcttgggtagaaacaaacgaccaaacaaaaacactgaaacacttactgagaaagtaaaaaaatggctattatggagaaaaagtacttttttcaaaaaccagaacaaccattctagtagagagaacaggtatacttgctgagtagggcgggtataccttgctaagcaggtataatttagaaacttccaaataattctaagattattttgcattattctcagaatacagtaaacattttttaaaactaaaggaaaaatgatcacaatgaaaaggaatggtattcagtgaaaaggtcagaaagagaaagtaaacaatttatttcgatctttactaacaaagaccatgggaaaattctcattctcaagctgtcttgcaatccaagagtaaatccagaagtaaatatgctgtgtattctagataaaattgaaaaattatatgtacttaaatcaccaagttggttggaattcatttttgataaaccaaatgtagagaaattagtgaaaccaagtgattttttacttgaggcttgaagcacacaggggtaaatgtggtacctgttggtcagaatgttcatcaatcccatgttggtctcaaaatgcagaaaacaaaaggaagggactagtaggcacctctcatgagggaggaaaaaaattacaaagaagttggtcactcagaaatgggtattgagatttcttacagttgatatttttataagtgctctggaacaaggaaggcaaagaaaactcatgagtttgcagtaaatattaccctcttttgggtaataaaatactaaactgttggaaataaactgcaagatcttttgaagttccctgagtgagcagttgagctttattgccaaatgtaaaccctaatacttagttatggatgggcattaattatgacccaagagacagagtagtccttgtttgtttcctgatagcattggtctctaaagggacaattgcatgccaccgaaaggggaatgatggaaataatagaaagcatttctccaattttatgggactgttcttcagctgcttcaggaatactctataatttaatcattatactttaagaaagagttgacaaatgtccaaagtaagataaccagaaggatcgagtggatgaaggattatatcagtttggattgtggcagaataagaagattgcaacttttagatttgaaaaatgaaggcttagaggatttttttaagtatgcaaatccatgaggggtattagatgttagttctgaggggtgtgtgtgtatgtgtgtgcacgtgtgcatatgtgtatgtgttttaggtataagttaaaagaaaacacaaccttacaaagcaacagtaagctttatgaaccttgttataaaaaaggggatgaggtaaaacatttaaatagattccagtccatctggagatgagattggactaggaagttttgagtacattcctaagcttctgatttaggatccctttgagaaagacacgggtcctcaggctctcccagtgtgtctacggcacctttaacatcagtggtgggtacagagtagatgctgagaaagacccagttgacttgaaagctatcatttattttatcatctttgacaaacattgtatgaacaaaaataatcctcagcaatgttcaactaaggctcttcaatgttttagttttgatttatcctactgagagtttttgaagttctagttagagaaaaatgactccatttgggcaacaggccttagaaattagtgaatgctgtcaagaaagttttttcctcaagggaatgtttgccctctttggcaaaccagtatccccaaatatcacccatagtgttttattgtacttgttttggaatattacttaacagttttctccatttaaacataattttataaattttaatactatttgttaatagtgatactttgtgagcaagttaaattaatttttttctagtttgaagattaaaaatcttactgggtccatccaaagagaatcattacctaatacagtatttagaaggcaaaatgatggaaatttatgtccaacttgttatttatgctagtttattttttacagctcaatgttgtatataatgtgaaggcttctgggtcttctagaagacgaagatctatccaaaatcaagaagcctttgatttagatgttgctgtaaaagaaaataaagatgatctcaatcatgtggatttgaatgtgtgtacaaggtaagtgtctgcttaggtctctcttctttttttcctttaaaaaatagacttgaaggtttaattatgtatagttgtctatatcaatctaagagttatattgaacaaagaattcagttatgcactacacttcagattacaaactagaaatactactaattatattcaagcatttattagatgcatacaaaaattatttacaagttttccctggacgtataacacatttgaatagaacagtgtatatataaattaataaaactcaggtctaatttaggaaaactttaaattaagtcaatcatatttaatacttcaaaaatggttatttcttgttatgagttatttttctgtagaaataattatttcaggttcatattgaaccttaactgttaggcatttaacccaaaactttatgataacgtgcaaattcaatcaagaggatagtttttttttaggtacattgaaaatattccagtttaggagtttctcatcttggataattagacacttaacagctgaagcttctgggagtactttttaagttgactcttaaattgttctatatccaaagcatctgagaatcttgttaataaggaaaaagggttctacctcaaccctaccgacttcacagtaagactgggaagctgcagatttttggtcattccactgcacacaggagtttgagcacactccttgtgaaagttcttgaatagaggcttcacttttttttctttcgtgaatctattctcttacatctgcattatttggtattgagctgggacttaaagatgcactggcattgaggagctgctgtttgctcttctaaaatatcccatagtgtcctggtttaacttagcttattgttgggctagaagtccctgatgtggtcctgagctggcagatgttcttcaaggtcatctctgggtgttcatccaggtggccagccttcacagctattgcctggacccagtctccgccattactgctactgtctgtctttatctttggaccttcttgttcatgattttggggtaaaatgtcccacatttgtcccattcttcaccttcttgggcattttgggccagcagcaaggggatatcagaatctctgtgttggcatccttttcagctgagaaaaaagtaggactccaattattttttacgaatcttccaattggtctctgttatagaataacaacttcaagttattactattattataaacaataacaacctacagtaattacaaacttatatgccaggcacggcaccaaacacttttacgtgaatatcatttaattcttacaggaactctgtaaagtatgtgttattattatccctgcttttctcaaattcctggcctcaagtgatcctcctgcgttggcctcccaaagtgctgggcttacaggcatgagccactgtgccccacctattcttgcttttctcattcgtttatttattccctcagcaagtattgcttgagtctctactatgtgccaggcatggtgtctgtgtgtcaggcgtgggaatataattgtaagccaaaaaagacacaagctctgccttgtggaacttgctgtttgagggggatacagaaattaatggaaacaatcccctaagcaagcctaaaattctaattttgaaaagggcaaagaagaagaccctcatggagttaagagagggagatttttacctcttaagagacatcaagtgaagaaacatgagaaaaatgaggtggggaaccagaattcagactgtgaagaggcctcagcatttataggggttcatgtaaggatgcaggatttccagttttaagcatcaggaatcaggtggacaacagagtttgggtggtaggtagagcctgaagaagggaaatgttttcatgtgagggtaggggttttataaaaaggatttaaatgctgctactagttttctgagaaaaatctggtatgaaggacaaataacatttaggtgtattttttcagcagcacattataaaaagattacttgatatttcagacactttattcctatcaacagggtccaagaccttacctcataccaggctttctgtgtggcatgatagtttaacaaattctgccccaggcttggtagagagatcagatcaaccaaggtacttttaatatgtactgaaagtataatctgcattgtgcttttaaatgtttaagcatattgactgtttttttctcatctatatttttttctcatatgcaaacacctccagtttcaatccatttattagttctcaataacatctattttggctcagtgcattgccagcagatggtttcagttgcttcggattgcagagccagctgaagtcagcagttgtactgtatggcttttcaatcagtcatgtttggcaggcatgggttttctgctctaaaaagcaagatttttctaacagcccttctttcttttgctatttaaaaggacaacaggtactaacttaatgctatgattcttttaaattggaggcaaacatctttccataatcacttagctgggctccttctgctctaaatgaaaagctcttgccatcaattcattttataaaaatatttatttccaagcagacaaaatgttgttggtgcccagatcctttgatgctcacatcacgtacaacagggcgagagaaggatgcagtgtaataaaactttccaaggcttgtaattccctcacggtggccaaagaaaacagaaaatgttcttcaagtatatgggagaacaaagggaaggcttctccctactggtctgatgtttctaaaatcagacgaataaaaggttgctaagaccttggatgggacctatcactaagtggtcaagtgatgcctccttctcagggcctggctttcagcttgcaagtttggtgctgtcaacttttgagaaaaggaaaagtgcaattctgtttggaatcaccactagaaaatagagttgtctgttgaaaggatgtatattgtactgtcacagtttataagcacaagcctcttacattgcaggcattgcatactatctgtcagatgaacacattgttgtatcattattccttatatggttaaaagtttcaagattaccacacatgtaagaaaatgataacctgttttaaaattctctatagggaattttatttgaactcaaacagtgtttggaataacatttggtgggtttgatttttgtatgaagataatttgataacagctatgggtttttcctgaggagttttcattcatcctccctctttgatttagcttttcgggcccgggtaggagtggcatggctcttatggaagttaacctattaagtggctttatggtgccttcagaagcaatttctctgagcgagacagtgaagaaagtggaatatgatcatggaaaactcaacctctatttagattctgtaagtagtaaaacataaggtaactgttgacaaaaccactgtgttttgtattcaggtgtctaccttactttaagtatgttttctttaattcattgttatttcaactttttgtgtccctgaatgagtttaacatggcaaccatatatttatctccattagaaagacataagtataaaatcagtttagagagttgctattaatgacgagcctgatgaaggccttcataactaaatctttatttcatgccagatatgaaatacgtagaaatttccatagtataattaaaaaaattcaacccagatctgaatttgagagcctgtctgcctcagggagttgcctaggctggagtgcagtggtgcaatcgtagctcactgcaacctccaactcctgggctcaagtgatcctcccactgcaggctcctgagtagctgggaccacaggtgcatgccaccatgcctagataatttcatgagaattttttgtggagatagggtctcattttgttgcccaggctggttttgaactcctgacttcaagtgatcttctggtcttggcctctcaaagtgttgggattacaggtgtgagctgccatgcctggctggaagacgaaagtcttaattacacattttaaaattcttccatgaagcttttaacaaaccttaaaggggttcatattcttaccttgaaaaattaggtgctaaatcatggaagactattctcagagatttgatcttgacatagaattgttacataaccttcgtgtactctttccattgctgagtgagtactactgattcaagaataaagtgcacacagtgtgtagggaaaggtaagtgaagaattccagactctacttggtatgtctcaaaactggtggtatgtaagtttattcttttcttatagcatctatatgagcttcataggttgaactgatattgagttcatagtattctaaggatttcatattacatgggtgggtttgtatgtttcttatttcagttttgctaagtatgaatcagaaatatattgctgaatatatgcttttaaaaagatagttcttgaatggtctcatttgttttagcacttcaaaaccactttggttaaagccctgttaaaactaattcagtctcaatataatgttaaataacagtctctagattcttttgctgtttaggaattatcttacattaagcactgctcaaaagccattggcctgatttggaacttgaaaaacaaatttaaggttttagtttagttgtgtaattggttttggagtttgtcttctatctttgatgctcttgttaatggttattttaatttgagtgtccagtactctttgagtggtcagtttgacttttcatttactactattggcaaataagggaatgtttgaaggaatttactaatttctgattctttaatgagtgttgtttgccaaattggccagatctatctctcttggagacagataggctggccttgtgtaccccatctcagtcattggctgtggagtacagccccatcttagttacctcacctactgggtgacatggcttgcatgagctgagggtgattcccaggagaaggaggctgctgtgagccattagtagtaactgggggtggggtgcaccatctgagacaggagatctaggtgcatgcaccctcaggcttgctgcttacttaaccactctaattctcagtatcccattcagcaaaatggaactaagaacaatacctttttgtaagcattgttttacaagttaaataagatagttcataggaagtacttactgcagtatctgacatgtagaaatcctccctaagtgttagtctctgtttcctaaaatgatgagaaaaaagaaatgtctttacttaatcatgaacacacagtgtgccaaccccttaagactcttttgtatttctcaaggtaaatgaaacccagttttgtgttaatattcctgctgtgagaaactttaaagtttcaaatacccaagatgcttcagtgtccatagtggattactatgagccaagtaagtatgctctggagttcttaatactttagaaattaagccaggcattcattcatttattggaagtgaccacacattggattggttctgtggcgagggcaggatttggtaggagaaagtacaggaggcggggaggcaggaagtgagcattccatttcagtgaagactattgataatttacaagggtcacatgataggttttagcatatgaaatttagaaatgatatattttttcataatgttttagatttttaactcacaattataaactttacaaagaaaaattggcatatagagtccagttatgtctcatttgcaaggtattgcttctattccaagcacccattccatctgtttccagctttaaaatgggagttcttaatgtggcacatatacaccatggaatactatgcagctataaaaaaggatgagttcatgtcctttgtagggacatggatgaagctggaaaccattctcagcaaactatcgcaaggacaaaaaaccaaatgctgcatgttcgcactcataggtgggaattgaccaatgagaacacttggacacagagaggggatcatcacataccagggcctgtcatggggttgggggaggagggagggatagcattaggagttatacctaatgtaaatgacgagttaacgggtgcagcacaccaacatggcacatgtatacatatgtaacaaacctgcacgttgtgcacatgtaccctagcacttaaagtataataaaaaaaatgggagttcttctaaaagtagagctaccatttgaccccacaatcccgttactggatatatacccaaaggacaataaattgttctaccaaaaagccacctgcactcatatgtttatcacagcactaattcacaatagcaaagacaggtcatcgacctaggtgcccatcaactgtgaattggataaataaaatgtggtagatgtacatcatggaatactatacagccataaaaaagaactaaattatgtcttttgcagcaacatggatgcagctgaaggtcattattctaagtgaattaatgaagaaacagaaaaccaaatatcacatgttctcacttataagtgggagctgaacattgggtacacatggacataaaaatgggaacagtagacactggggacttcaaaagtggggagggagagggggaataagggctgaaacactctctattgggtacaatgttcattatttgggtgacaggatcaatagaagcccaaacctcagcatcacataatatacccttgtaacaaacttgtacatgtacccctgaacagtaaataaataagtaacaaataataaataaaatgggacttcttcaggagagaacatgaacagcatctgcaatgcagtagcatcggctggagttagctgtttctttattgagggagtctggtgttttgctgaaacttacacttgataacagatttttaaaagtgtgtcaagaaaaatatagcctgtttggaaaataacttgagcttctttgattttactggtaacttcttatttttataaaatgatggaaatttaggacgtaaaaatagagagctggtctggagatggcccaagtttaataggatgaatccatgttcagtcagagggactttttgtatgtgatctctggcctaatgtttctaattgtaatatgtcttattttgaataagcgcttgtggtggctcagaatcatcacaatgcatgagaagcatgaacatttttatgtgttaggtagttgtagataattacactttaaatgagatgaacttgttcccattgttgttagtgtttcatagagtattcaagactaaggtgtagcaccagttctctcctcatagtcaacaagccagttcctcttgtcttttgcctcctgttggcactgaggaagagggttcacccaggttcttgtgggacatttgggaaacactggtgtggcactttttttctagtggagggatggaatacactgtggagacccaatgacagtaactagttgtccaactttattactttacttagttgcaaaattccccaatttatatttcttgggtgcatggggaacattttaaacatttaagaaacaaaaataattcagtctatgcaaatttttatggaaaacaacttacttatgaggaggccattttaaaatgaaaatatgggaaagatcagaataagctaaaccttccaacccattttaaaaaatctcaaaacacatttacgatatggaaaacagtctctgaaaaatcatgaataaatttgaaaatagaatatgttttttaaaaattataaaactcatttatgttttacagtgagttcactgtggtgttataggtactttaagtagtttttgtcatgttcgcttttagatactatatgctgagtgttttaaaacaaggtattgcataggcagtcttcccttcatatttatgtatttttttactagagcccagggtaaatgccccttttcagtagttctaatgattagaatttgatttgagtgcatagagaatgtcatcctaaaataaactcttgaggaggttaaacagtccttaactgaaaattctccctgatgcagtaagagattaaagtggtgcttgtgattgcagtgtgcagctgcagtctatttgctctcttttaatgctggccaactgctggtggtagacagattggactgagcgcattgtttctctcttggatttggttagtactttggaccactcttggacatttcagttgtttcttgtaaagaaaaataaaattaggttaagaatggaaaactcagaaaagtgtatcgaaatgctcttatattttggcaaagtcaatgtttctaaacaagggagccgtgtgaactgatgtctgcttctttgaacagggagacaggctgtgagaagttacaactctgaagtgaagctgtcctcctgtgacctttgcagtgatgtccagggctgccgtccttgtgaggatggagcttcaggctcccatcatcactcttcagtcatttttattttctgtttcaagcttctgtactttatggaactttggctgtgatttatttttaaaggactctgtgtaacactaacatttccagtagtcacatgtgattgttttgttttcgtagaagaatactgcttctattttgaaaaaagagttttttttctttctatggggttgcagggatggtgtacaacaggtcctagcatgtatagctgcatagatttcttcacctgatctttgtgtggaagatcagaatgaatgcagttgtgtgtctatattttcccctctcaaaatcttttagaatttttttggaggtgtttgttttctccagaataaaggtattactttagaataggtattctcctcattttgtgaaagaaatgaacctagattcttaagcattattacacatccatgtttgcttaaagatggatttccctgggaatgggagaaaacagccagcaggaggagcttcatctgttcccttcccacctccaacctagccctactgcccaccccaccccaacccaccccatgcccagtggtctcagtagatacttcttaactggaaattctttcttttcagaatctaggtggtgaattttttttaagtggcacggtctttttctgcttgaaatctgatcacaccccccagccattgccctccctctctttttcctctgtagagaaatgtgaggggcagtacatttactgtgcttttcacaccatctcagaggttgaggagcatactgaaaattgccctggggggtgctgggtgtgctatctccttcccacatcctcagccccacaccagctctatttcaggggtgagagtcagagagcactgcaatatgtgcttcatgggatttcgattcgaagatcctagaccagggagacactgtgagccagggatacaacaaaatactaggtaagtcactgcagaccgacctccctgcagtttgggaaagaagctgggtttgtggagaatcagagcatcttgacatgactgctgacctaaagatccctggcattggccagggatcctgtggaacctcttctagttcaggggtgtgagcattagactgccagttgtctagtgacatctgatgcttgctgtgaacttttaagatccccgaatcctgagcacctcaatctttaattgccctgtattccgaagggtaatataatttatctggatggaaattttaaagatgaatcccccttttttcttttcttctctcttttctttccttctccctttcttctttgccttctaaatatactgaaatgatttagatatgtgtcaacaattaatgatcttttattcaatctaagaaatggtttagtttttctctttagctctatggcatttcactcaagtggacaggggaaaaagtaattgccatgggctccaaagaatttgctttatgtttttagctatttaaaaataaatccatcaaaaataaagtatgcaaatgtatcttttaaagttaatttttaaaaatgctcttattttagtgaattttcagaaattatagtggaatggatgctcatatattgcttatggatattttggataccaaagtaggaataactgacattcagtattttaaagctggcaaacctgtacatagaaaatagatccccagacagtggtctatgaagagggcagttaagtatcaaatacttaattttcttgcctttttttcttaagtggggaaaagtttctagatctcttacacctctgacacaatctgttctaaaacaggcacttgtaatgttggggcctccttgtaaacgtgtttttgccctttactctctgggagttctttaaaggtgaaatcatcttacaaagaaattgggggagggtcttggcaaaggactttcccctcctctttcctggcctgggaaccttatactgacaatcaatactttatattttaaagtatataatttatagttaacttctagtgtaatatattaggaaacactagaatggaaaggccattggaagacaggttgtatcttttttagaccatatttccttgtttaaaaactatcatttgaatacttttttggtgaagaactccatgttttcaagttaaaggtcacctcgtaggccaggcgcagtggctcatgcctgtaatcccagcactctgggaggctgaggcgggtgaatcacaaggttaggagtttgagaccagcctggccaatatggtgaaaccccgtccctactaaaaatacaaaatttagccaggcgtggtggcatgcacctgtagtcccacctactcgggaggctgaggcaggagaatcacttgaacctgagagacagaggttgcagtgagccgagatcacgccactgcactccagcctgggggacagagtgagattctgtctcaaaaaacaaaaaacaaaaaagtcaccttgtaactcatctctttttattgtaagtttattaaaaatgaagaggacaacaatgagaaggaacataaagggttagctagcactgtctcctggtgcatggggctgtgcagatgtcccggccacttcttccttcatacttcccttagagaacttgctctgctacaagcagtgggcttggactaaaagtgattaaaataccacaggcataaggagaaaaggagtatatgtagtagtaataattactagtataaattattttcttcacatgctatgagtaataatattaaaaaactcattttaccattaagattccttatgctgaagctcttccatttagaatactgtcaatgtcatttactggtatgaactaaagtcccccttcttttccactcactgggaaccttagtaaaacaccagcatatcttacctctctttctgactggccgatgcttccagagactgaatgttgggaaaacctagtagccaaacaattctaggacagaataacatttttatatttggttccaccatcttattacatttagttatagttttaaaaaagaaattcaagcccattaaaatatgtctggtcaatgaaatgcttccttttattgtgttgtgctattgtgctttgtttttcaaaacattgtaaaaatagtatctttggtttagtattttggattatatattataatctgaggagtgttttgcttatgtagaatccagatatatttctgttacctaggagatgttacttacatatgtaatactgtatcctgcacatggaaatattcagaattgtagatagcataactctccctgctcctattcttttgagcctaggtataattttttttttttttttagaaaaagacatatttagctttaatttctatttatgctaaacatatttataagtagtctgtcaatataataccaactatttttatttttacataattcaattatttcatttgacatgtctggcagactcaagacattaagtaaaaaattggaactatgatttttctttgtcattttttaaaaaagaattattttattaacctgctggcatataatctggagttcttttcacaaccttactttttctgatttgctttattgaatgattgaatactcatttctttctaaaaatatgttgtaaattctcccttggcaagatttctccctatgagggtagttattatttgagtctgccaagtggttaccatggggcaaggtgccatgatgtattcttgggtgcattggttttttgcgcattgtaaatttaagacacttatagtaagtggactcattcatagatgagtttcagaaccttttacgttctcggtagaggcttctgtcggacaggcagaagagtgtattcctcacttttttttttgtcttcaaattccagtaaggcatagcacttttaagaaattagaatttttctatcatctatgcaaatgatatttatgttaatattaaatatcttatgttacactgggagtaatttgaggtgcaattatttttattactactttgaatagaggaccattatccttctttcttcagaaaactaagaagtaagtgtaacttttaaagtaagtatatatcagtgagagtaggcttgttttacaactatttctagccagtgagttgtgttttcatgtctcatcaaaagacaataccacattgcatcattttacaaaatatgttgtcattttcatttcagttgtaacataggaaaatagatatttcctagatgatttctgagtttcttactgcaaagaacagttataaattggtatacatgtgtctctgtaatagggataatattgatatatctgttgctacatatttaagaatcattctatcttatgttgtcttgaggccaagatttaccacgtttgcccagtgtattgaattggtggtagaaggtagttccatgttccatttgtagatctttaagattttatctttgataactttaatagaatgtggctcagttctggtccttcaagcctgtatggtttggattttcagtaggggacagttgatgtggagtcaatctctttggtacacaggaagctttataaaatttcattcacgaatctcttattttgggaagctgttttgcatatgagaagaacactgttgaaataaggaactaaagctttatatattgatcaaggtgattctgaaagttttaatttttaatgttgtaatgttatgttattgttaattgtactttattatgtattcaatagaaaatcatgatttattaataaaagcttaaattctcatctattt

SEQ ID NO: 146 - DNA, 72108 bp, Homo sapiens
atggactttgacgtcggcagaactacacacctaagttccagtccctgctctgccagtaacgggggtgaatctgggcaagtttctaagcgtcggtgtcttattggagaaagtggacatggtaatagcgaacttggggcatggtcgtgaggatcaaaacagagaacatggccatagtatccggccgcagtgggccactctgaatcccctcggttgccccttctgtttccgtgtgactcacgcagctttctgcacagatggtatccttctagacgtctgggatgttcgaggcggttgtattgaataccgtgtgtgtattccgggtgagggggcgcgcaaattggggcaaagaaagctacttcaggatatttcgctctgctggggcttgtctccagcgctctctggccagaaaaagcgctggcacaaaaggaggaggtgggtgggtcagagccccgaaccgcgcagtgttccagggggggcggagaaaggagggcaggccccaggcaggaaggagggagggaaagaggcgagaggaggagttttccagcccggccttcgcccgcccgctagcacgcagtcccttggtctcttcggtctcctgccgcccccgggaagcgcgctgcgctgccgaggcgagctaagcgcccgctcgccatggggagccccgcacatcggcccgcgctgctgctgctgctgccgcctctgctgctgctgctgctgctgcgcgtcccgcccagccgcagcttcccaggtaggatcggaggcgtggctgcctcctcagctgggcaccaaagacccccggagtcgccgttgggacccttcgctcgggatagagggaggtgccgggggcgccctttgtttgcgcagaactcctctttcgcagcccgagggtggggatgatgcggatcggggctggtgtctgggcacgcgccgggaagaactgaccatcccatctccaggcgcggggcgccctcgcggcgacgggagccctagcaccttctgcgtccgggcttccagagttccaatcaaacccttttcggtgtaggaggctccacagagaaagtttggccgcagactagtttgctactttctcacccccagaattttgcctctcacatggttgcccactggaggctggcagcttgtcctggaaggagcctctatgccctcccactacacgtcccaggctacccccttggggccgcaggacacgagccacggtaaagcgacttttgtggaaggcacgggcggggcctcccctgaatctcttaaccccccctgctggggattccgagaaagtctgcgcctctgaggaagaattgccagctgagagtggtgacatgtggcatgcacttgattagccccagggaaagagggctactcgcgcaaggatctgctgggcagagggtgcggcttattcctggagggcgtggtctccggcatctaagggggccctggtgtttcttgggggctctcatggtgtgagcaaaattctctttggagatgcactttaaaaagctccagctaacttcctcaccctggagtcttaggttagcgaagagcttcaggggagtagggcaatgtgccatgcactcctgttgcctcggaatggagaggaaatccatggatgcgttttaatttagtgttaatgggaaagtgggtgacgtcggctatagggcgtgcaaatatttggctctgcgttcaacaccgtgggcagcttaaatctagggtatgagaaatgaacctactgagttctggtagaaggatagaggatgcccatctttctagcagtgtgcttgggagatgtagggatggctgcgggaaattctctgcacgcacctaaataaatgaatgaatagaacaaatttgtaaattaataaacaggaacatttgtgttttgagctgactcttaagttttaagctgctttgtaggaactgattcagggtaaagtggaaaggaaattttatccttactgccaggcaactgttattcccatggtgtgttaatacctcctctcccaccccctttagcaggaatcaggttaaaatgaacctgtaggggaagaggaagtcattaagcgtcccagaagcagctttctgggagcgggcaaataaggtgagaagctagaggtagcttttccgcactgagttgggaggtgcctgtgagctgcctgggaacctcaacttttagttgagcctttctcaagctggggaccccttctccttttccatccgacctccctccgttctcctcccctgccctcccctctcctttctctcatcttccacctttatatagtacagcttgctaccagggcccagccacagaatcatgagttcgccagtttgggcattcactaccacctgtcttttgggacctatccctggctttcctggctccctctgccagcctgcaagctgctcccaacttttagccaccatgttcctgcttgccaccacctccactgactcctaacctgccctccggctctgctcagaccacaaatgagctgaagctgattggagctgcttgataaacactcctcttgagcctccttttggcatggctcaatggggtctcttgggaagtgtgctccgctgaggttgtgagatccagaggaggggatttcagtccaagccagaggctttggaaggctggggaggggaaaatctctaggcccttgggtctgaaagcaaatcacataggctgagttcactctaagtgctgggtgacaaattttaaagatcatttcagagacactctcttagcaagtggacatcatatcttcagtaagagagaaagtgaaggacttgaatctggaacttctgaaagaagatggagatctagggctccatcagcaagtcgattatgtaactatctgcacgtgaatagcacatctgtcagagtgagagtaaatcattctcattcccactcctagaaggtctctggagttcttccatcttagaatttaatgcagcttttctggctctctgatctattttttgcagcctagcaaagatgcagtgtctataaaaacctacatgaagtgtatggaaaatttgtagaaaagttgtttgtgtttgactgtgtttgtatgcttataacagatgagaatttagattctgttcttaaaataattcttagagctgtatttgcatgtgagatagtggtggttcactctgcctccttctgcaaacaaggctgaagatggagaatgagtaccatggcctctaagaaaggcttcgtgaatcttacatctggagaaaactggtaaagtagcgtggttttactagtcaggaaaaccaagtgaggtttgctaaaagccaaaccagactacatcagctgaagcagtcttttgaaataccacatttggagataagtactaggaatggagcacctagctcaggttatataattaaggtgtcaccgggaacaggctaggaattcctatttagatttaaaacatgtaatcagctgacaaaagtactctgcaatgaaaaggaaatatgctggggagagcaggtcattttcctctggcattttcttcattgataacactttcagtacagtacaatgttgtttgttagttactactcatttcgcagatttgggagctgaatgagacaccagaaaccattgttaaagcagcgtcttcacatcttcccacctcatcagtcctcgtaccataaccaaagtgctgcttttctcttttagattattgctataacattctcacttttggtctctctaattctagctcattttactttctcactttagataatggtcttttaagtccattgactttagtactgttttttatcacatcactcccttactcaaaaacttagggcagcaggtccctgttctcactcaagtaaaaagttctcagttgtttttagggggctacacagtttgcttctagcctaattttccagtcttttccccctggtttcctaaaatcctatccttatagaacctgagtcacattttccttcttggcagatgctgctttctgtacctggaatccttcccccttgccatttgtccaaattctgcccatcatccagcaacacccccactttgatgagaccttttcttgatcgctccaatgggaagcaacgtgccttccttttaacacccatggtctcactcatgtctcttatatttatcacatatatcacatatttgataatgctgtatattatcataatttatgcactcttcttcttgtagattttaagaccttggaggcaggggccgtgctatgtcttacccttatttgtatttcccacggtgcctagcagagcactttgtgccacatggatatttgtgcgtaatggattaacagtgcctgtaactccagtgatgggccattggacaggaaaggagctgagggaaacatgtgcacaggtacacagggctttgtgccaccatgaatctacatacatagaaacgatggcttactggatacagaggttccttttaaatatacgaacactctctgtttaagcaataaccttctctgttgggggctgtaagatgagagactgactgcaaccgcaagctggagtttgcatttattatttttgttggccaccttgatctgtgcctttcccaagtggttgaatggtttccttagtaaacgcaaatatgtgtgctacgtcaattcccctttcagagaacacaactgaaattagtaattgaaagtgaagagagaatttgaacagaagaaggtttagttttgccaggctataacatagtatgaaatttgtagcaggcaagttatgattaatgcccaggttagagattcgcttccaaaatagcagcgtgaataataacctctcccaacttccaattcatagggagtttctcaaaccagcccctcagttcttgactgtgtgatgtcttaactgctaacttttatgggccatttgttttaggagggtggtcttttaagcctgaatctctgggaaatttgggtttagttctgaaatagaatcagtttctaccttttctaataaatcctgggctctgcccagagacttatttttaaagtgaacactgaatgatgaagcatttatgtgcttgggagaccacgatgaagaaggtatgcaatttcttctctctcgtagctttctgtcttgtggggaaatagagacatagttatttcaggtggtcaatgttataatacaattggattgacaggcccggggagcacagagaggagctatgtgggaacactggaattggttattgaagaatgatgctgagacttgctggtgcggagatggtggcactaaaggcccaagaaaagtgaaagtagaggatgtgtgggcttctctaagaatgttttgaaattggagacaaaaatctgtgtgagtgtcctttttctggggagacggctctatcccgattcaaaaccactagttactagagcaccttcatgaattctatgagaaaatatgcacttaatgggcagaaaaatcaacatacagagtaagatgaaattaccacagtaggtaaactttgattgaaccagtgagcaggtggcctttccagttacagccagctgtatagtttccagttattttcatttaaaaagcagtaccaagcaaaacagatgtaatcgtaaattgtaattgccttcaggcctgggctggtaacttgctgtacccccctgccccacttagtacacagtgtgacttgggggaggatctttagtcagtatttgtggattaattgattgaagtaattgtgaatcaaagtattccatttcaaatctcccctgtaggatttaaccagaatttccaagatgacactttcctgagaaaacggattgcaagatagctaaatgtcaaaggaaatttgtccatttggacaggcaacgaatcagggcatagttaattgcgaaggctcttggatgtcaaatcaccgtaagacattctaagagacttagaaactcaagggagttctgggggcaggatgtgcagataaagatttagaggaaaagcttgtgcaagagaaaagtccttggtagcactgctaagctcccaagttttccagatgataattggtagcacctggatcttacgggtgtctggcacattctgacctcagaaacctctggagtactcattcccgagctgaatgattcactcacccgtaatccttagctcacaatggatgcttctttatgcattgttctccagggagaagataaatgggtttggacataatggcttggattatcccagaggtttggggttgtaaattgagcataatgattttcaaactttcttctgagtaatagatccaaacatagaatctggggacagactttctgccttggccttgaaatatcattgcaatatttcttctgtcccactcttacagtgacctgtagtgtagtcacatgtactagcagctcatttcccctgctatcactagctgtttgcaatgtacatccagtagtacttaatgagaatctcctcaatgctgattacaccccatgatctgctaatggatgacgctcgcctgccgcttattgtgtgggtggctgagctgaatgaccctgccaatcccagtgatccaagattgttcgcaaacacggttaaattagggccacagggtgagaattaagccaaggtttggcaggcccattgtggagtggtgaggaagcggtggagcggctacatcctccacctcctgagattctgcccacaaagtggcaattccttataggaactctgacagacatgttggtactgactcagtgttagtcagatcaaggctccaattcctttcaatccccaacactgaaattttgtttccacttagattttaattcagctttccaaggagtagggtcattgtgttgcaccattacctattcacggagctgatgcccccagccacgtgagtaggttgtgggatcttgttcatttttgtattctcatggtctagcagggagcctgacttctgggaggctctcagtggatctgtggagtgacatgtgctggggggcatgcctctggccagttctgagcctctgggtgggtgtcttggtctttatctagatttctgcaggagtttctctgttccacacccaggctcccttgcatgggttgcctaattcatggaaccacggaacctcagactgggaggatgcctgagatggtaacttgccctgcattttagggaggagcctctgaggcttagcaagttgaagggatttgtctggggtcacacagagagttaaatgcagagttgggagtagacctcagtctagtggctatagaattcctttcacttcataggcatgcattgaattcaatttttgagtgatccctacatgtcaggcatcctgtggggaaccagagataggcaggcaagaatgaatggcactgagcatttgatatggtttggatctgtgtccccacccaaatctcatgttgaaatgtaatcttcagtgctggaggtgggcctggctggaggtgattggatcatggggggcggatttctcatgaatggtttagcaccatcccctttggtgttatttttgcaatagtaagttaccataatacctggttgttttcaaagtgtgtagcacctccttcctctctctcgctcctgctctggccatgtaagacatgcctgcttctccttcgccttctgccttgattgcaagtttcctgaggcctcctcagaggtagaagctactatacttcctgtacaacctgcagaaccgtgatccagttaaacctcttttctttataaattacccagtctcaagtatttcttcatagcagtgcaaaaatggacgaatacagcattgttcactgagcccctgtccagggtgtatctcagggctattctttatattgacacttggctgtactctcagcatctcatatctagagctgtttggatgtttttcaagagttctgagaagttgctgcctcagtgtcagtccttgccctcttttgaggttgtcagagtcccaaatgcttcctctctataccatttgctttgagctccccaactgatttgtgattaaattcataacagttttattgagatacaattcatgtaccatacctcattcatttaaactgtacaattcaatggtcttagaatattcacagagttgtgcattcatcaccacaaccaattttagaatgttttcattgccccccaaataaactccaaaccttagccatcatttcttaatcccccatccctaggcaaccactaatctattttctgcctctatagatttgcctacaattgaccttccataaaaatggaattacacagtatttatcattttgtgtttggcttctttcacttagtatagtgctttcaaggttcaactgtggcaggatactagccagagtcagccaatggtgcctggccacctctcaatgctggctgcagggccaccactggtgcataaagcacctttgggtgaattagaaaaagaggcccccatctggccacatgtagatctgtggacacagggcttggtcaggagacagactttgggcaagaaaaggatagaggcaggcccaagactcaaggacttgaggccttgagtccaaggattcaagacttggagagtggaggacaggcttgatttgagaccccacttgctctttttgagggtgtgacggtgggtgctgtagtgcagggaactccctgaactatatctatgtagtcctggatgtcagtagcttaactccaagtggacaagctatggaccccatattcttttagagcttgtgactctgtaaaataacaaaacagaaagctgtgcttgcatgccagcagcatctgtggtgaactcttgggtcacctgggagcacgttaaaattgcagaagctcaggcccaaacccaagacctactgaatcagcatcttcattttaacaagatccttccaatgattcttctacatgatgaaatttaggaagtactggtctgatgaatgagttcagcccttggccaagacagagtggcttgcctgtttataactgacacacaatggttcacttcccctcctctcccttttcctgttggctttgccttcatcactgaatcctctgaccttcctttcctaagtccccagcattcctgagataagcatgtacagcctgtaggttaggtttttcctcccttctctaactcaaaaacaaatgcaacctcccttggcttcatctccttttaagcctttctgccaggaatacagcccctgcctggcttagccttgagcagcagcaaagcacatcttcaggctgattggtaacaggggccttgcatggctttttcctgcagctaagatgtattaatacctgatgaataactttagctgtcaagaaaaccaggctagtgtgatcagggccgctcctgccactccggcaagactcctggggctgagaattcctggaactgatcagctcttaaagacacagggacttcttatcttcataccagaaatcaatgacactggggttagcggggaggcagcaccttgggagatgagtgagagtgagaccagtgggttagtcaggaaaacacacagcccctcacattaagcccctcaagctccatgaattggggatgtcaggaagactgaactgttaacagcacttaaagagggtctctcaccttttcagggagttgggtaagtagtagtttccaacccagcaatggtattttttttctctgttcttttcctcttttttttttgaccgagtcttgctctgtcacccaggctggaatgcagtgacatgatctcggctcactgcaacctccacctccaaggttcaagagattctcctgcctcagcctcccgagtagctgggattacaggcgcgtaccaccacacctatctaatttttgtgtttttagtatagatggggtttcaccatgttggccaggctggtctcaaactcctgacctcatgatctgccctcctcggcctcccaaagtgttgggattacaggcgtgagccaccgtgtctggccagcaatggtatttgtacaggctgagtaaggatcacctggggagtctgatgaaatatggtttccctggctccgcctctgtgtattttgatttggtagatctaggttagggaccagtaatctagggtgaaggtctgcaaacaaagtccaggcaggccaaagatggctcactgccagtttttatatgattagttgagctaagaatggttttaacattttaaactgattgaaaaaaaatcaaaagaataataatgttttgtgacaaatgaaaatgatataaaattcaaattttgatgttattggaacacagccatgttcattcctttgggtatttgtctatggctacttggtgatacgatggcagttgaatagttgtgacagagtccatatggcctgcaaagctgaaatattttcctttacagaaaatgtttgccgaacccctaatccaaggccttactcaaagtgtggtttgataaccagcctcacctgggagctttatagaaatgtagaatcttgaacaccatcacagatatgaaataagcacctaccttttaacaagattcctgggtgtttggggctacttcttccccaccacgaggctcagctcaggactcatcttggaggtccaggccagcatgctataactagccttgtatacggttaatttatctgacacataactgggtgtctcattctcaaggtttgaggcttggtagcctcctgatatcttagatgctctaaaaactaggttgctgttttattcttgccaattcttggctaggatccagtgtcctaatctgaggctggaggtggactggcttttgctacctgctgacatatttcttaatgcttcctggatttctagacagcagtctccagatgtgctgccctgccaggatcttggtatgtagtatggcccatagctctccaccgtctcctacttccttccatgaagcactgcttcccagagacattcagaaatggtatatgggaagcaggatgcactgtaatttagttgcaaaaggctgggttaaataggtttctttattgcaggactgctcagggtcattgatatgccagtataccttgttactctctgagagaggacaaggaggaatagtgaggaccacagaatctcaaagtggggtctgtagaccagcagcaacagcagcagcatctcctgggaacctagtagatatatacattctcagaccacaccccagagctactgaatcacaagctgggtatgtgggaagtgggcctagccatctgtattttagcagatcctccaaatgattcttatgtacactcaagtgtgagaaccactggtgtggacgtttccaaatggttttctccgaacatctcactagcctagtgtttcacatttgttgatttcagtgaacactgtgtttttggtttcaggacaggacatttgggaacatgacattgaatttttcctgaagcatttactggtggcagtgaccactgcaggcttggggaggtggaagtggggaagaaaaaaaaccccaacctttgggtagcatcatctgtcccacatctgtctctctagcaattgtgtcttggttaaaggaagtttttttgagacgaaagccaccaacttttgggtgttgccaacatgtgttctttaaaatgtgtttttgtgtattcaaatgtaaagaaagctggggaacagcccttggggtgtttctctctcctcttcacgttacttcctttcagaatactttcttctgtaaaatttcctcatccaaattccaaactcatcttttcaggccagccaagtccaaatggctttcatttgagtgagtgacccttttctccatgggaagcctcaggacacattcagataggagggaagctatggctctcagcatgaggaggctgtgtcttccttctcaaagctcagctcactccctcccattccagaccttcttcctttgccttccatggctagtggtgtcacagccatgggtctgtgtgtgaacactttttagtgtttactctgtgaggatatgtaactgctgtgttgtcacttagtttgaaattctcagtgatagtgaggcttgagggtgagttgggaggaagcactaagttattctacttcctccatgggctggccgctgaggagaggaatgagggttgagaaagccatgcagaccttgattttcagtgaaaatagatgagacaactgacaacttccatttctatgtttttggtgggcagaaaatagatattatcgtttacttttcttggcttggtggtctgaatgctacacatatctataaaatggcccatctgatattgcagatgagctgaaagtatcctctgatgaatgtactttaacaaggctttcaaaaattgtaggctgaccactttttttccaaaattttttgcaaaaaaaaaatatatatatatataggctgagcacagtggctcacacctgtaatcccagcactttgagaggcctaggcgagagaatctcttgagcccaggagtttgagaccagcctgggcaacatcttgggaccctatctctaaaaaaaaaaaaaaaaaaaaagaaattagtcaggtgtgctggcactcacctgtagtcccggctactcaggggctgaggtgggaggatcgcttgaacccaggtggtcaaggctgcagtgagccatgatcatgcactgcactgcagactgggtgatagagtgagtccctttctttaaaataaaattataaaagtaaaacatgctcattatgaaaatattcaaatagaggcataaaaagttgaaagcaggcccacccttcattttcctcttgattccattctctttttctgaaattgccactcagtagtttgatataaacttctggacacttttctgtgcttacgattcttaaacaaaaaaggtaaaaaaggaatgtattgctacatgtaacaacagggatgaatctcatacataatgttcagtgaaataaaccagacacaaaagagtacatatggcaattccatttctacaaagttcaacaacaatgtgcaaaactagtccatggtgttacaagtcagaatagcagttgtctttatggggtagccactgggaggggccacaagggggtcttcaagggtgccagcagtattctgtatcttgatctgggttgggaggtctcatgggtatgcacatacatagaatgtattgagctgtatacacttaagatttgtgcactttactatatatgtttacctcaattataaagaaaaaaatacccacaaatgtatgtgtgggcggggcataaatggatttaagatgtctttgttaaatttccatgccattgcctatgggaactttggaaatatatggtagtgatttgggttgtcataatgatagagaaggccaggcctacacaataaagaattggctcccttagaatgcccatagcgcccacattgaaaaacactgttttaaaagtttgcagactgttctattgggcaggtgttcagaacatggggtaggcctttgaaatagtcttgcctggatctttactctgtctttgtttaaatggagttgaagcctcaagagctgatgtggatggatgggttcttgatttgtttttgccttctgaaccaaattgtaaaggagtggaatcatctcctttgccagggaacagaggcaatttgataaccctcaaatgtgaacttgatgcaagagagagctcttctccagctcagtgtatccctcccatgctcatagctctctgaggccatgtggcctccgccagtgtcttggtctggagtcttctgctgaaagtcttactgcatcctcctttcctttcttagattttctctgtgtcccatttgacctctatagaggagagttaagcatttgaaggaccacatgccacatcacaaattgcttttgttccactgtctggttttactttaaaggctagccctctttttgtctgtctgtgttgactggggacagtcaggctacagagctttgtgaatgccccttggtgagaacaggacttggcatttattgaggtcccctgctttgggctgacctcctcagatttaggtgtttgtcttttttctgtttctcctctctcccatctctgggcaatgggcagggacacactttggcccttcgtagtattaaacaatagaaggagactaaattggaaaaatattattttccccttggaccagagtaatgccttcatttataaagcttttcttttaagtttatttttgttggctctgtaaagtaggaccacaattgatatttcacaagccacatgctgttttaattgtctttgctaatgaaagacagagggcctggggattatgggtgccatggactctgcctagggtcttccttttggggtctgcatagaagagtttgaataagaggatggaatattgtctaatattgcctctgatgaaacagctgtggaagcaaggctgtctctgagagctcatgtctggcagggatcattctctcaccagccagccattctactgccatttatttctggatgaaataaagttaaaatgaacatttaagtgtagcctcaatggggaaagaagttatgtaacggtagtatttggatgccagagagggaggaagagtccccagcaggatggagccccaattgcccacaacagtgactcacagcagttgcccagtgagcagtacccttattgtctttcttctcttcgctgtctctctgctctagtccatcgctatgcttcctgggattgcttcccaaatgaactacttgtactttgtcttagagtgtgcttttgggggaactcagacaatggctaagctggaacttaacccaggattttggtttctggtccagagttctttgtactgctgaattgactcctgctgaatagaactctctaggtcactgaatgaactgtaaagaaggcttctgtgatggacacttggaggttgtttcacttatcttttgatgcataagaaaccactccaaaacttagtggtttaaataagtgacaactatgtatttactcatgatcccgcagtttgggcaggactttgggggacggctcatctctggttcacatggtgttgtctggggtgactcatctgggtctagaggatccgggatggttccactcatgtgtctgtgtctgacacttcatctgggatgactgaaatcgctgggatggctggtccctctctctgcctctctgcagtctgcatagtttagctcttttccatctccccgtgttgccttactctccagcaggaagctggcattacatgcagctggcctcccagtggacaaaagccaaagctaccaggacacttaaggcatagatccagaattgtcacagcatcacttctgttacattctattagtcaaagaaaatcacaaggcaggcccatatttgggatggtggtggtagtggatggagtctacctcttatatgcatgtgcagggtgggaggaattgtcggtggccactgtgcaggcaatccactacagagctggtttgggacggcatattggagatgggagtttaattttccaggatgtttgctgggtgccttctgattagatgctggacctcaggttgctagccaagtgtattaggctgtttagctacagaatgtggcatatgcagattcattgaaagttcatagaagtgagtaaatcagcatccctgggaatatcaaaggctcattttccaatggttattgatactatcaaagacaaagactttattaaacaaaaatgaactcaaaatagatcatagacctaaatataaagcctataaatatgaaacttcttgatgacaacatgggagaaaatctttgtgaacttgagttaggcagagatttcttgaatatgacaccaaaagcatggtctataaaaggtataattgataaattttactttattcaaattaaaaacttctcttccaaagaccccactaagagagtaaaaagaaatatataaagaactctctaaactcaataacaagaaaaaaagccacctaatttttaaagcagacaaaatatttgaacagatacttaaaccaaagatgttcaatattattatccacctgctaactggattaaactcaggcaacttctgctttcgtctgccaactgtgaacaaagccacctgctcttttagggaagtgatttgtaatatacagtgcaaatgtaaggtatggttatacctcccacaaaacaacttgcacacatttctgctccttgtagagggctgactagccattttctctgtctctctcactggactttatgtgacagacacccgcaaattgctagccatggccgttaagtaaccactggccactggcaatttgaggcagatcatttactgtaagctcaagtggacgtgggtgtctcctaccatgcttttccaaaccaggctggtttttaggcctccctaaaaaaatctcccactgcctacttgttctgccctcaagtgtcctgatgtcctttcatttcaaggaacttgcatcatttgagcctgtaacagagggcttttagtcttctttggtactattgatatgtaagaaatgtactttgactttgatgtttttctttgaattcatttgtaagcaatggtaaagtttgaaatgtattacttcatattatcatatattattcttctcaagacctaatgttaaattcaatgctgagtgcttaataaggatactgattacatgagaagtaacagaacagttttcatctagtttctaaatttaggggaaaaaaaagcttggatgaacgccaaataatttcccacttttgtgaatcccaaaggcccctcttcatgcattgaacattcctgaaatttctggaataaaaaaaattgtgagaagaacacacagggtttttaaaaacgactttttacttgaggtgtacttgccatgtaataaactgtactgaattgctttcataccattttcaaaaattaattggaaatttttgtacagatctgtttctgggttctttattctgatccattggtttatgtgcttatttcttcactaataccaatactgtcttgattactgtagttttgtaatatgtcttaaaattgggtagtgtgattcctctaactttattcttctttccaaaattgttttggctataaatttcatataaattttaggatcagtttgtttatatctgcaaaaccttgctagtattctgatggcaattatgtcacacctactgatcagtttgggggagaattgatatccttaatatttgaatctttcaatccatgaatatggtacatctctccatttatttagatattagttgatttctttcacaaacattttttagttttcagtatacagatcccatacatgttttgttagatttataagtatttcattttatggggctactggaaatgtttttattttcttaactttcctctctaatagtttattgcaagtatatagaaatacaattgatttttgtggtttgactttgtatcttgtgatattgctaacctcaagtgttattttgtcgattctttgagattttctacatagacaatcatgtcatctgtgaatagggacaggtttttcctttcttccttcctgccttccttcctttctttctttcttctctccttttgttgcgcaggctggaatgcagtggcacaatctcggcacactgcaacctccacctcccaggttcaagtgattcttccacctcagcctcctgagtagctggaactacaggtgtgcaccaccatgcctggctaatttctgtatttttagtagagatgtggtttcaccacattggccaggctggtcttgaactcctcacctcaggtgatccactcgcctcagcctcccaaagtgctgggattacaggcgtgagctaccgggcctggccagagacaggtttatttcttcctttccaatctttgtatcttttctttctttcttgtcttattgcactggctaggattacctgtatagtgctgaatagggtagtgaaattgagtgttgtgttgttcccagtcttagggggaaagcacctcagtctttcatcgtaaagtataatgttaattgtgggctttctgtagatccccttcatcaggttgaagacattctcttctcttcctagattgctgtaatttttttttttaaatcacgaatggatgttaaatttcgttaaattccttttctgtattaattgatatgatcatctggattttcttctttagtttgttaatgtcatgggttgcattgattaattgatttttgaatattaagctaggcttccactgtcaggatacgtaccatttggtgttaccatattattctttttatgtagtgttgtgttttatttggtaatactttgttggggatttttgcatctgtgttcatgactgatattgtcctgtagttttattttgatgtgaagtccttatctggttttggcatcagagtaatgctagccttgtaaaatgagttgggacatgtgttctccacttcaattttgtggaagacattctgtagaattcttttaaaaatatttgatagaattcaccagtgaaatcactgtgcctggagatttatttttaggaagattatctattcatcttgagtgagttttgatagttcgtgctttttgaagaattggttcatttcatctaagctgtcaaagttatgtgtagagttatacacagtatctgctgtgataccctctgtttcattcctaatattggtaatttgtttcttttctttgtttttctttgtcagtcttgcttgagttttgtcaatgatatgaatattttcaaaaaacagcttttggtttgattgtttccattgtgttgtttcattaatttctacttttgcctttattatttttattatgtcctgctgcatgctttgggtttgttttgttctgtagtttcttaaagtggaagcttaaggtattgttttgaggccttttcctttttctaatataaacatctgatgctgtaaattcccctctgagaactgttttatcccactcactgtactctctctcctctcctttttgaactctattgactgaaatgttaaacatatggatattgtcccacagctccctgaaaaaaccaagattaaaaagaagattgaaaaaaaaagtttattgagcaaggggaagaccaagaaagacaaaaagtcacaaggagtcttcctaccctcttaagaccacatcttctctacagagaaaaaaatctccattcccagagttttaggtatctagagtttgctatacaattgctgtagtcgccactgctgtcactcctgcccactgtcaccacagggttatatgggggctgggtcatgaaataatggagaaaatgaacataaaagaaaaccagggaattttcttcattctctctgaagcattacagttcttcttttccactcttagagtcagagatagagggcttctcctggaactctctctgtacccagtgtctacttctgtgtttgggctgattttagtctagtcctgggataccagagcaacaccaattcagtgttaccccaaattcttttttttttttttttttgagacggagtctcgctctgtcacccaggctggagtgcagtggcgtgatctcagctcactgcaagctccgcctcctgggttcacaccattctcctgcctcagcctcccgagtagctgggactataggcacccaccaccgcacctcgctaattttttgtatttttagtagagacggggtttcaccgtggtctcgatctcctgacctcgtgatctgcccacctcggcctcccaaagtgttgggattacaggcgtgagccaccatgcccggccccaaattcttagtctgcctgctaatgtttactttttcagaatcaccaaagagctgttcagatgcactttgttcaggtttttcagctgcattcagtaggaaagacagggtgaagtacgattactgcatcttacccagaattggaatattgtgacctttttttttttaacattacattatccttttcatggtagtcaggtggttttcttcctcccttccttctttctttctccctttgtttcttcttttctttattttctactttttcttcactatgatgcctagtatattgttagacctggataaataacttttgactgttgcagatggtgaaaagtcttttgtgtgaggttttatagttattacaatttagagaaaggattggattgtttatcattggaaaacactttgttttctaaagatatatctactaggatgagagaagaaaaaatcacgatctaaaaagtggggagtaatagtcttatagagtcactgtgaaagttcagaggaatgatatatttgtaccaggaacaaatatgttacatttgttcctttaagtaaattcagtcccatccaaaaacgtatttattgacattagctcatttttgaaagcctttttaaaatgagctaatatcaataaatatgttaataatgaaaggaacctaacaatgcagaatgattaggcatcaaatgctgtatgtttactgtggtttgaatgtttgtcccctccaaaagtcatgttgagatttaattgctgtagtaacagtattaacaggggacctttaagaggtgattgggccattagggctctgccttcatgaatagattaatgccattatagcaggagtgggttgttagttatctcaagaatgggttcctgataaaagggaggagtttgcctcctctttccctttctgtctcatgtactcccttctgcccttctttcatgagatgatgccgcattaaggcctcaccagataccagtgccctgttctggggctcctcagcctccagaactgtgagctgaatagacttctcctccttattaattacctggtctgtggtattttaacaacagacaatggactaagacagtgtccttcttctgctttattagatagcttatttcaaaagtgaacaagcaatcctgcttgtagtctgagaaatggaaattgtggagttgagggagattcagtaaaagatgatctttcagatgaggctattgttaaacttttcattaaattgcttttattttggccctagtattggtatcatcaaacattaaacagtcttaaaaagtgaaatgatacccagtcatctataaaagagtgaattgtgagaaattatatggcttatttcccagtagagacaagtgatttcacattctgcagcagacccatgagccacacaagtcacatgaaaggtggccatagctcaggtgtttggctcagctttctattctatccaagctatttctaatcacagatgaaccagccacacattcttattttgagcagacatctgaaattgacttcagcttaattgcaataacactgaggattggaaaacatttgtgttaacatctacattctgttcaaaacatcaacaaaagccaaatcccccaaattaataggctcttttgaagacttctcttttgaataaacagtgttgacatgtaattcatcattaactcataaaaacacttcagtaatataaatcaggattgaagtctaaaagccattctgctttcaattagagcatccaaatctggtatacgagaccttttctcctttttttttttttccagccactctgttattttgtcaatctaatctcatctgtatcctgctcacgctctaggaatcaagtctttccctcagatgcaatgcctgcattctaattttaaaagtagttaatagaatataccaattccatgtttaaacaggaagaaactaaggctcctgagaggtgatggggctagccaaagtcacatggctagctagtagcagagctagatgaggattcttagcacctcactccattattttaccctagtcttctagaaagaccctgtgctgttcccagagtctcacctctgaaatatcacactttttttattttttttaattattattattatttttttgagatggagtctcgctctgtcgcccaggctggagtgcagtggcgcgatctcggctcactgcaagctccgcctcccgggttcacgccattctcctgcctcagcctcccgagtagctggaactacaggcgcccgccaccacgcctggctaattttttgtatttttagtagagacggggtttcaccgtgttagccaggatggtctcgatctcctgacctcgtgatccacccgcctcggcctcccaaagtgctgggattacaggcgtgagctactgcgcccagcccacactaaagttttaaattcagtcacaaatgtttttcaataccttataagtatatgaaccaaaaccaacttgtgatgacattaggttggtgcaaaagtaattgcggtttttgccaatggcaatgaaaaaaaacctcaattacttttgcaccagcctgtagacgtcaggatagtggcaggtttctgaccatgttctgtttcttgatctgagttctcttacatgggtgtgttcagtttataacagttcattgaattgtgcactttttaaaaaataaaatatttattacgagtggcttatggtattatccctgattgttgctcgggccccagaacttaatatgttagtaatgtcctttattatgcaacgagtcacctttctcatccagcttaaaaaataattttcctcttaacatttttttattttgctctccagtatacttttgcttcccagcgcctgcctaatgtttgtaccatcagtgttgtagaatcctacttcaaaagaagcatttgctacagcccagaatcatagcggtaatcatgcagtgatcttagcccccaccccagggtgcttgcttgtttgatagtcactgtgagtgttcctaataagccagggcatatctggattcatcatttatcattttctgtgctccaaggctccaacaatatgtgtgataaatagcctgtagcttattttctaaatgacagcagtgaaacctcctgtttttctttctttgaattgaatctgagacacatgaaattggtattctctgaggcttctctcttctccctccccacatttcttttacagcaggggaaaaggcagaaacctaagtttgtgattggtagtggattgaaagccgtagatccttttctcctctccagagctaaggaaatgatcttttgtgagcattcatcactctgcctttttattatttctctctcttacctttagagtcttatttcgtcctgtcctccacctttctgtacaccactccctccccaaaggttgctttttcatagcgtaaaagttgatcctgagtatgtgtgcaagacattatttggtactacaatttcacagaatcatataatcttaaccttggaaagggctgtagagccccaccctacttccctcatctcacccctcttgccagcatccttcggcctcatgggaacacttccagcttcagtaagctttgatggaatctcaagatggtcttggagtcttagaataccctgcctcacactgggctaaaatcagctctacatgacatctagccattgtccttatttctcacttttggtactgcacaaagtaagtttctctctatttttatccatgggatgaccattgagaaatcagaacacagggattctatttccttttagtcccattttcttcaggctacaaatctaaagtttattcaccattcaacaaactttttatttatttgtttacttatttatttgctatgaaagctagtctctgttggtcattttttgttttttctttctagcatcttctggcatgtctgtgtccttctcaaagtgtggccccaagtgataaatatttgaggtgatagatatgtaaattaccccaatttaatcattatgcattgtatgcatatatcaaaatatcactctgtattccataaatatgtacaattataacatgtccaaaaaaaagaaaggaaaaaaaaagaattggcccaaatggtctgttattccagtgtggttgcttcagtctaggataagccagacttctttggtttagcctctgtcctcttgcaggccactgttgctctctcttttttaagaaactatttcacctgctggctcacaatgtgggcaactagctggctgctctttcccaagcctgccagggaagctctcccccttgctgggtgtacagcttagtgtagggagagaaatacaagacttcatgtttataatctctatttaatttctccttgtaggtttcaaactagctatggcctatggtttcatcatctgttggttttgcccatctgtagccaacattgttgatgccctgtgccatctcccctccgcccatctctggattcatctgcagctgaggtagacagttctcaaacatgctgacagtttctcaccttagatgtccacatgtcttagaggctttgcctttagatttactccagtcctgtgggagctcgctcagcaagaatttctggaagagtaggagatgtaacaccccgccagctcttagccaaaaaaaaggcaggagtctgtgggtaaatacccaacctttcgtgtccctgggttgtgtttcctcagaggctcctcagtgggaatgaatccaggttgcccccagaagtaacctgctcattagcatatctttatgggcttttcccctattcctttctcatttcccctgctttctcactgtgcttcctgggatcaccttccaaatgaacaacagcacccaagtccttgtttcagactctgctttgggagaaagaaaactaagagcttgtcctccccagcttggttatcttctacagatttgttcttcttaattcttccttcactggtagaatgacacagagccctatagcatatctcctgagaggaggttacctgttaatgggttgtgaaattcttgtagtggtcatgattagcactttttaaacactcaaatgtaatagaatagcaaatatgagagggcatcatacttaaatattgttccatgaaacttatttttcgatcatataaatgtatgtgtgtactgagtcacaagatgaaacattttctgtggattgtattcaaaaaagtgaaaagtaattgctttctgtgaatacaattcataaatcagtatttctctgaatggacctttatgtaaactagatttactagaggaggcattctcttgggtaaaccaaagaaatgaggttactttggcctgatttgctatttttgaaccaacgctgattccaaattgtcactattctaaaaatttcttcctattttttttgttaataatctgttctaaaataacgcttaggataaaattgaaacttttcatgtctatggtttccatactccatatttttactgatttgaaaattgtctatccacagcctttgacacttctttggtttcccttaatttttcagtgattatgaagaataatttcacgtccatcctttatattctttaaggccctgggatgtagtttccttggatctggaaatttgagctcaggtaaaattgccagctgggatctcgttactcttgagcccttcttcctaatctgtggcttttccccatatataatattaaagcaagaaagatatttaggtggactttaaggaagaaatttcaactttcctacaagtaaaatgttgagaacagcttgggagtaggctgggaaggctgtctccaaacttttgagttttcattgggactctctcagtacttgaggctggcgtgtgcatcagattgtcttccaagagtatttccagatctaagactctctaattttattggcaaagcatatcttttagttggaggcccaaatggtaatttttaagaacttcttggataaacatgttcttatcattgcaaacaaatgagaaacaaacctaacaagctctttgcatcaaagatattttaattgctctgcttgaaaaattttaaattaaacaatgagtagaaaaaaagaatatttacataatatgggtatggtaaaaaaaaaaaaaaaaaaaccacaaacacctctacttaccagccagtttaataagaacttaccaaaaaaagagcaaaaactttaccctgtagtccttgctattctttcctttggattcttttcctttcgctatctcctcagaggtaaccaatgtcctaaattttgtatttatcattcctattattttctttatagaatatgtttatatctctaaaaatacattatttacagccgggtaaagtggctcatgcctgtaaccccagcactttgggaggccgaggcaggcagatcacctgaagtcaggagttcaagaacagcctggtcaacatggtgaaactccatctctactaaaaatacaaaaattagctgggcgtggtggcacgtgcctgtaatcctagctacttgggaggctgaggcaggagaattgcttgaaccgaggaagtggatgttgcagtgagccaagatcgcgccactgcactccagcctgggtgacagagcaagactgtatctcaaaaaaaaaaaaaaaaaaaaaaaaaaaccaaaaacaaacaaacaaaaaacattatttacatttgcatgcttttgacttgtgtataaatggacacatgctgaatatagtcttctataacttgcttgcttttcttcacttaacattagattcttaagagttgctcatgttgttacatgcagttgtgattttttcattcacgttatcttgtaagatcccattgtgtaaatatgccatcatttatccatgctactcttgatgtgcattttgggttgttgctagttttatgttcttgtaaacagtgctattgggaagattcttgtctatctcccttgaacaatgtgcaggaatttctctagactaagtacctaggagttgaattgctggataatatgcatacatatctttgactttgttcaataatgccaaattatttactaaggaagttataccaatctaaacttctagcaccaatgtgtatttccattgctcaacatccttgttaacacttgatcttgttatatttttagagttcttccaaactaatgggtcagaaatggtatgactgtggttttaattattgttagtggtattttagtaataatataatagtaataataatatggttattaattctcaggggaaggattttccttctttcactcactgctggggtacaagatgagaacttttctttgtagtccctatacatgggatggatttatttcactctttacactgagagtataggctgttggtatatcagctttatgtaggaggtgagggtgaggggatgtaggcagtctcctctaaaactgatgaccttgaatagtctctggagtttgtcttctgtatccaaggtctcaccagtccatggaaattaaagctcagttttggcagttatcctcagaataaaaggtgagccttaatatctggtacctaatcaggatcctgctttcacagtatttcttactttcttgcaagctaaaagtggatttttttcattgattttcatgtaagcacagccaggctacatggctcaccatactgcctgaaataggatcctaattgcttgactttgaaattgattccattttcaacctttagttactttcaaatgtatttcatgatattgtgccagagcaatctgtaatttgatgtttgaaggacatatgtacctcctcaaattatcctcttcagatttacaaactagaaaattctcagtggagatggctgacctaccacttgttcaagattttacaatgagacaaaaagttgccatttgcaagcatttgaggaaaatttttgggtgttcatcaagggaggagagaaaaagactgcctagggtgtttcccatttgctgcctgctttaatttttcatttataattccttgctcagaatttcattgaagaggggaatttctaggaagcattggcattcatgctctaaaaatgccctgtcttaacttccctaatgcagccttaacaatgatgaagatcccatacccagtttgattgtgctgtgtaaaatttgaatgtgacttgactactacacatagaagaacattaaaagacccatactaacaaaacaattactgacaggttttgttagggctgcaaaatagtgtgtttgcatttccccccctccccacctttcttttttggataggtttcatgtgaattcatgtgagtaccttgattgaattaaataattcatgtaaatcacccaaggcagtgcctgaggtagtgtctgttaactaaatagtaggtatttcttctctcttacaagctaggactgtaaggactgtgttaggactcactggtgtctaccttggccagtaagaccagataagatggtgctgtacaaagctgctcctgcatggtaaaaggctggagaaatagttgctacttcatttaatttaccttttatttccttcttaccctggactttcatctgcacaccaggatgctggaaaattgctcagaaagactcaatttttggcaaagttccctttagggcacatactgcctttttcactggcccatggtttctgagaactgccctcatcgctgcaaatgaggacttcaccagcccctccagtcccttccctgcagacagcctgccttggtcctaggggaaggacaaagggagcctgtcactgcaggcccttctccagcaagggactgggaaggggccaacatgcctgcaggctcctgtattgacaagttgcagcatccttaagagcagccaagaaataaaatggtaatttgtgtttgcatctggaatttctgagcttcaaaatcttggatcacagcactctcaataacagaaaacaggacacacatataaatatccatatccatattagcctctttgttaaactctgtctgggtcagcagctcgagactgaaaagtagcaggatgattgtacaggaagtagaatgaacctgaatgctgtgtttcagggcaggggacagcgggcatgagagggacgagaatggcctccccatttagtggaccctgagccatccccccagggacatctagagtttgactatattatggcttaaaacagctcttatggactctctaggggacctgatcaccactgataatgtggtttccaaggaaaagccaatttcaaattataagcaactgatttataaatgcactttggggatgctgccatctgtaggtgagaggccacatgactcccctgtcatcagtgccctgatactttggcagggttacaagccacgctgtgcctctttgtggggctctctttagctgggcagtgggctaaatgtggtattcgttggatagcaccagaagcctatccatgcaacatattatctccacttgcctgttctgctgcctgaggtttccccatgaggatcaggaagtttccacaatgagaagaaagccatttggggaaccctgtaaaaaactagtgtgttaaggcattatgtaaatatgagagtggataaatgacttagctgatatgtacagcaaagactattctgattatcaacttgggagttctagataaggtgtgtaatacaattgttttcaaactcttttgattgctacctgcagtaagaaatatgttttatatcacaatccaaaacacacacataccatgcacacagtatgccatcaactccaaaactctgtcagtcgtcagtcaccattattttaggtatcactaaaaaagaaaaatgataccaattaaactatgccattccattgattatagagctcatcttgggttcagggaaattaaaatgttaaaaagtgttgttttagagtcaataaaatatggtatatgtgtgtgtgtgtgtgtgtgtgtgtctgtgtataattgaaacaaaagtgtcatgaaacaatgctcacttttactatgtatggtatattataagtatctgctattttcccctattctaatctaatgtattttattgcaaataaagctggtcccactaaatttatggaatggctcactaatgttttaatttaattttaaagtgttaagtctgagctatagtattgttttgaaatagggaattggaaatgatacactgagattgatttcttatctcaaaccagatgtcatgctgtatgttttagtcatctatttcattcaaatgtaaattgatggtctactgtttaagttaggactcttgatggcacatgacagaaaccagtttcgaaaaagctttgaagaaaggatgggcttatcatcttatgttagggcagaggtatgcttgtggggccaagcaatactggaaccaagggctcaaatattgtgggatctctctttctctctttctctgttttgtttttgcttttctttgatggcttcattctctcgaattagcattctgtatgagatttaatctttgtcgttggcagcttcagggctcacatcttcctcattttaccaccagagaaaaatccttccaagattctcattggttcatgtaattggttcatatgattgctcctgtagtcaagggataggataaactcacctctactagaaccacataggtatgaggaataatgcagttttccaaaagaaaggctcttctttctttgagaggaacacaatagatgtctatcacacctaggaagtgctagcaccaggcattgtgtgctggggtgtagcctcacacaacaggtattgccaaaagcctgcagatgatcattttgaaaactagaattgccgtcagcttagttgcaccttcactttcccactagagcttgagtctcccagtgaagataataataactgacaacagctactgtgtgactatcagttcaagggcaccgaatggagaaatcggtgctttcaagagagaagctacccagaaaagaaatgattctacctcccaacacaggcagagctggataaaatagccatctgtaaaaaacttcaagtaaagtccaggtttttgttcttgggtgctcgtgttctattccctgttggggaaccggagaatgttttataaggaagaagccttaggtttcagctgagcagactgcagcctgtcactttcaggcattctcatgatgttcatttcagtgtttcagtgctgttttctggaaatatctttcttcacactctcttctctctgtctctctctgccatttaatgtactatattaaaatatcaatctacagctggcaattaaaagtttgctgcctacaattctcagtacacactgtggcgattttattttattttcttagactctgtcttctctgaattcagttattctcagttttgccaagatgtgccagaattttgtaagttatactgctgggttactgccaagaacgacgtaccagtcgcagctttatttgggcagctttttgtgccttaaatacagtatctgtttctgtaagtacagccttcactgagggagatggatgtctcattctgatattgatggaacagcttgagcatatcagtaatgtgtaggctaaagtctcaaggggaagaaaacttttgagagcctttgttagtttcacaggggcagtaaggggaaacaaaccctgaccgtattccctgaagagtttgatgtctagctgggaagaaaaaactcgaaatggcttctgaaaatccaacgcaacataaaatcagtgctgatttaaaaatgtgaacagagtgcatcaatgtgaatggaatggttaggaaagataaactgggggagctaggctttgaaatagctttaaacacaagaaaggaactgagaggagggaaagggctttcaggtaggtttctgagtcatgaagacagaaacaaggagtgaaattgcatgagatttagaatcagaaaagttcaatccttgttctcctataactgataatcacttcattctctgagctgagaatacaatcataaacaaagtgtcaaagagttgttgccctccccaggtttacattctagtcactgaatgatacctgcctcataaggttgcactgaggacttaaagaggcaatggaaatgaaagaccaggcagatttttaaaatgatgtgccatggtaatttgtttattgccaggtgtagaaggaggagggcaatttgatttgcttgactgctgttgtcccagctagaggttgaggatgggagtgttctagggtaacataatttgaaaacaggtactatgcccttctaaacacttctggtgtcccattttacagatgagcaaactgaggctcaggaaagaaaagtggcttcccaaatcaggatggcactggaacttaatcccagggctttttcagttgcatcctaccagagaggatggccatgagcagttgaggaaactcagtgtctgcttgctgtttcatgggatataacatctatgccctgaacaaatcagataaaagtagacttctaccaccgatcccccaaaggctttctcagattttcagattccttcattctgagggaggaaaccgaattaacttaacaaatgtaggttttcaaagtatttaaatcactgtttttctaatacttttgacaagacccacaggaagaaatatattctactgtgacctattgttagagtgaatatattatttattgtacaaatcaggaaggttttgagtgtgaaagagaatgctattaataataatgttagatggtaaccatgtgaggtgatggatatgttaattagcttgattatggtgattatatcacaatggatacgtatttcaaaacatcatgttgtaaaccttaaatatatataattttgcccattataccccagtaaagctgaaaaagtaatgctgggacaacaggcataaaatgggactgtgctatgcaaactggggataccctaccacacatacacctatataaaaacaaaaattgtacaaagtaaggtttattctttatatgtgcagtgcaccctgacattttcaattctatttcactacaaaaatactagtcatgacctactaaatggggtcaacagtttgaaacatactattcttagttgatggttggtatcgctgaggcacttatgatggtagtaaagacagggatttggtaagctgaatgtctgatatgtcctataaacttgtttcatctgaacattctgttgaatcttctgccacaagaaaagcactggtaataaacattttcttcagttcattccccatgattagcaaaaggtttagactaatctttctggatccctttgttccatttggaacaagaatcttcctctgtgtatttcccctcttttcttactcttgcgcttttatctattagtctgccacttatttagggatgtaaggaatccaaggaagaatgtctcatttacagatcctggttctctgtgtacttgttctgagccttcatcttggggttgaagctggtgctctgaaaagctaaagtttctttttcgctctactccttcaaacatatacacctttacacacaactcctggacatctctcctctgttgaaactttgccaagatataacagaatagatcttgcctgctagtcaggcatacggaactgacttctgggcttcttcaaaagcccccataaattaggactttccagaagagaagcttctgcagatttagctatggaggagagaagggttaccactgtacctgtgtccacacaagctatggacaggccctttgttagcccatttctgtcactagaaatgtttgtacactcacctgtgttaacaagagcttcaagaatacaagagacccggcaatagcacctttcagcaataaaataacttttggtgagtccccattttgtaaatgtttttaagtcataaaggcatatagggaaccacagggtttttcctacctcaaagtgtaaactatggtaatgtcttgagcctaaaaatcactttttcctaaagcaaattttattatctggatcatctgaactcatagagtaaacttgacaacagtttacttttctgaaaaagattgactgtatggcttttcctggtggttattaagatgaatacatatacatatgtttatgaaagattttctaaatcacaaatcatacaggattgttagaggaattttaaaaaacacacagaaaactttggaagcactgagattcttgaccatgtttcatgcttaaactttaaaaagtatatcatgccagatataagtttgtcatatttttacattttttcaagaaactcatttacacagcagctcagggatgtggaggccttcaatttatactcacataattaagtagaaaatgtgattatgaaccctcaaattagaaacttgtaaaactaaaacatatatattatgccatttaatttatggcaaccctgttgaggcatgcctaattggggtatttgaggcttagagagactcagtggctctcttagcttggtttcctagaagcaaagcttatggtttgttgagggaatactctcaggaaaaaaacctataattgaggaagggaagcaagaaagagctaagcaaggatagagtctcaggtaaattctagcaccacagggttcttagaaacataaatactgcaaggttgtccttccactcacctttgggggctagaagtctggcttcatgttcctccatatcaatcaaacattggctgcctccaggaaacaggtggggaggaagaagtggctcctatcagctgaggacaattctctggagaagagggcaactgtgagttatttgcagtcaaaggctcccagcagctaggagatgggcacaccagcctgagtaaaggggatctgattgaggaataagcagtatctaccgcagtgacctaagagaagactattaaaccaaggctgagaggtacatcagaatcttctgactttaaggcaaatgccctttctttttcccttcctccttttgtactttctactcttcctacaccttttcctccttttgttttaaaaacaaatactgtttattatgttagaatttttataagtcaggatctgggcatggtttagctggctcaaggtctctcatgaggttgcaagcaagttattggcttggcctgcagtttcatctgatggctcgacttgtgggtgttatgtgtgtgtgtagctggggagatcttcttataaccttacttatgttattgttggcaggcttttggtccctcaacacatgggccactccacagggcgccctcatgacttggcagctaacttgacccggaatgagtgatccaagagagagagtgtgagacagtattcaagatggacaccacagtctttttataacttgacttcaaaagagatatggtgtcccttctgccaaaatttattcattagaagcaagttaataaattcattccacacttaaagtgaggagttacaaaaggttatgaatgccaggggacagggataattgggggccatcttagaagctgcatatcagagtctaccctctggcacccagtgattatttcccaccaacatgcaaaatatactcactccccccccccttttttttttttttagaaaaatagcatctattcacagctaagcagctcactgagcctgctttctgacagtataattgtaggggatcaaagacctctccttattccttaatgtctctgccttcctaagtcaagctagtgatatttcagcatatataactcttttaagaattttgtgggtctcctgtgaatcttcttagaattcactctattagacaaaagttcaccctattagccaccttacaaatctcatagatatagactcttctctgtttgattgagaggaacttgagatacccttaatctctctaaggggccttttgtaagactgaaggtactttaaggcactaccttgatttaacaaaggattttacagccgtaattttgccttcatctttaaatcatgtttttctggcaatgccttggatttgatctttgttcagaagctattcaaatgtccttcatactgtaccacagctgctctgtaatccattggcagatcatttgttagcactaaatcatctggctcccacaaataaacaccctatggcttccaatagtacaaaatacccttttgtaaacatccaaatctgcagtattgtcacagtttaaatttatatacggaagctggactgattagaataaaaccatccaaaattataagcatgaggacataatttatgtgtcacaagaaatttaaggcagatttttctcttttttctccaacatttttaccaattccaaatcatatactgggtatacaaggtaaattagacatagttcccacccctgagcaatttatagacatgatttatctccatagaatacttttaaaaagttaggtctaggcctgtgctatccagtatggtagctattaaccacatgtggctatttaaatgtaaatttaaattaactaaaattaaatgaaataaaaacattcacttctcttgttttactagccacattttaaatgcttaataaccacataggactagtggctgccgtatttgacagtacagataaagaatatttccatcattgcagaaagttgcattggacagcactaatctagaagaaaccagtatgataagcatttatcctttttaaaaacatatttgcttctctctccccaacactaaaatgagttaaatatcaaaaagaaggacactacatgcttcttcagtaaatattctaacatgcttaacaataaagaatgctgtaagaccatggcttttaaaatttattaaaatctactgaaagctaacatctttttcccctagaaaaagcatgctagtaccaaaaggcatgtatcaaaagcatgtaccaaaaaacatgttcaattacaaggggttcatgggccctccaaagccctttcattaattctgtagtaggccatgatcctcaggttaagaatccctactgcaaagtaaattttattttcccattgactttcagtataaaattgatggtgcaatttactattaaatatgcttctttctgacaatattaaaattatgtctagaataatgatgaagggagaaacaaaatgtaaagaatgaagaactgtcttcaaaatgactaaaaaataaacccaacactttgagctaaaaatataatacagagccagcaaatctaccaatttgggtcaggtatcataatcaataaagaactatgtagttttagcaaatttgccaagttttccattagtcttaaatctctaccacatccctaccttacggtgagaaaccttatggcgtgatagcaggaacactctactagccttcagaaatctagtctcctgatgtaatttcaatacatataataagtattatttaagagtgactttggtgcctcgatgatcttatctacctggacattcagaatgaatgggtggggttccataggccaggaagaccctaatttgaactttggaaaaaaaaagagtggctatttctttgaaaatctgttgaattagagaaagtttttgcaaggagagcaaaattataaatgcagttggctccaggtatggctgagagacagaatcctacatggctctgagtttctgatttctgagccaacgtacaatttgtatttgtgtggaagaagcactgaagcattctttccagagtggtaatctgaaccatatgtagactgattaatagttatgtcataataaaacctcaattagcagaattctagagggatagccttttataaataaaggaaagtttactaagaaacctcccttctcccatcctccccaacttctttctctatttttcttccttttgaaaaattttaatggtggggaaaatctttccccaatgtacataaagctcctctgctgctttagtaagtacagtctactgaacataagtgagtctgtcttcgagcttattgtatctttcagggtgtctattttgcagactagtcatcatatttttatagaagttaatatatgagctcaggctgaaaataaactggaaattttctgagagtggcagctaatacccatttattttcttttcacttaaaaaacacctatcaaggctgagggcagtggctcatgcctgtaatcccagcactttgggaggcccaggcgggcagatcacttgaggtcactagttcgagaccagcctggccaacatggtgaaaccctgtctctagtaaaaatacaaaaattagctgagcgtagtggtgcatgcttgtaatcccagctactcagtaggctgaggcacgagaatctcttggacccaggagatggaggctgcagtaagccgggatcataccactacactccctcctgggcaacagagcgagaccctgtctcaaaaaaaaaaaaaaaatctatcaagaatatgcagtaaagttttcattcatttgtgtatcagtttatatgcatacagttgcatgtaacaaacagtgctattcacagtggcttaaattgaaaggatatttattgttgacctaacaagaattgtggaggtaagatgtataaggttgatgttgtagtctggtgacatcatccaaggtcctgggttctttttatctatccactttgccatcctcaactgaaaatctttagtcctgtgacatcttaccttgtggttgcaaaatggctgctccagcttcagacgtttatccttacacaatagcctccaaagctgaaaggcagaaaagagggaaaagtcttctccttgcgcagttttctcttttatcagggagaaaaatctttcccataagctccctccccctgcccctaagcagacttcattttacttgccattgtccaatattgggttacatgcttatccctggagcaattcctggcaaaggggaattaattttttgacttaagagtcatcatggttcatcgtttggggagggacacattgctgctgaacacaacctgtgatcttttagtaagaaggaaggggagaatggctgctggacaggcaaccagcagcttctgctacacatggattcttcattttgcttctgtgggacccactcttggcatatttgttctcacactactgaagaagccatttgctgtttgcctatcagtgatcccaaagccagctatctcatttctttgaaattgtaggcgcagaaggcagtaaggcctagtgaaaaaagaatgatagatttgaaggccaggcagacaggattcgaatccctgatttaccatttactggctgcataaccttggacaagtaaagacgttagagacttggtttccctaatgataaatctaaaatagtaccaaatggccagtgttattgtatagatttaatgagatagtgcatagaaattgcctagcatagtacacatatcataggcacttagtgtgtgttatttcctttcccatgtgaattcaattgcacagaaatcagattgcatttagcttagcagatagaccaattcggaaaaagagtaagtttgactccagtaggttttttttttcttttttcctccttactcatctatgttcacataaaagtcccctctcttatctacaaaagacttgtgggtagaaagcagtgtgccctgtgttagggtagtgtccagttactaagagaaagctataaaaccatatattcatttcttaattggtttgcttaaatatctgttaggtttaatataggaaacagaatcctctctaggtattttatgcaaaaaatgatttaatgcaggaaataaggtactcacaaaattggaagggctggagcaatggaagtcaagaagtctgcattaaaggtcaaatggcaccatgacttcagtccagatgccagaaactcctcctatcactcaggctaggaaactgttgctgccgtgattatcaccactgccaacgtcactatcctccctaccacacaaagctgatgaggggacagtggacacagttgacaacactcacatctgctgtagcctattttctgcatgcacaactgtagaaaagagttccttccctttgattccttccaaatcactaaaagtagaccctttcacaacctagggataagggaatctagaaactgtacttttcaacccaatgccaggctttcttccgccttacccatgtgaaagccctccttatcttactaatctgtgattcccctgctgggctatctgcccatgtgcattctctctttgcccctgttttccctctatgccctgtttgggctctgacatcctgctctggcctaccatgcctccctgtcctttctggtacagatgtctgccttgctctaaaggccttagaactcagttgttcaagaagagaagattaggaaagggtaagaggtctccttgctttgttaaaaattaccgtacatatctttgtatttcccaacaatttagtgttagaagtttttgaactttataaaaaaggagtcgtatatatagtatatagtcttctgggaccaactttgctcacaatattattttagttttattcatccatattgttgttctcacacatgagctttgccatattttaaaatcttaatgcatttttgcattttgggggttatgcttctttctttattcattcagcattctataatattttcccatgttaagaaacctcttcaaaatgaacattattatgttatgaatggatcataatatgattgaccatttcttgtagttggatatttaagttaattcctatcttagaatgtggtagatgaagaagatagaagaaaaaaaggctgagattttccatgtggcagagtagctggaagatggttatttgctgaaatgggaaacactgggggatgcacaaatttggtgataagaaaaggaatctggttttgagcaggttgagtgtgagtgtggagatatccagacaacagttgaagattctagcttggctcttaggagacagttcaaggctagaaacaatggatttatcatcagtacatggggaatggtttgaggcaagtatgggagtgagatggcccaggaaaatagtctggagatatgtaaaggaccaatactggactcctgggaaatacttatgtccaaatggcaggctgatctagatgtgctgtccagagagtctgtttagaaaggaggaagaaaatcgggaaactgttgtcatttggaagccactgcagaagagagcttcatgaaatgaatgggtagtcattcatactaaatgctgtaaatactgtagacaagttaaccaggatgacaaccgagggcaaaatatatgtatgtgtgtatatgtgtgttggagggctgggcggggggagaaagcttgctgctcatgtatctggatttttttttaatttggatgattgaaggttcacatgcagacatgcagttcaactgtttccttgggtagattcctagaagtggaatgacttgatcaaagggtttgagcataggcctttgattcatgttgttaggtaggtttcctggttttcattgttttttgttttgttttgtttttgagatgggttctcactatgttatccaggctgttttttgaactcctgggctcaagtaattctcccactcagcctccctagtttctgagattacaggcatgagccactgtgtctggttccagtgctcatttttttatatgcaatgatgaatagtttgtaattttgtacacatctgggtgtgcagagacaaggtgaggaaatctgcagcaaaggaaaatacagaattgggcttctgtagttgcgggtcttttcctaatgaacacagtccagccctcatctcctctccactttcagtttccacactctacatctctcatccagaacacaagtggaacagggaccattactcattagctgcatggggatttgaataacctcacagtggaggatgttcttgtctgttatggtggcaagtaactacaactaaatgcgtgaccaagacagagctaactcgagtcattaattagactgtgaagtctggagggaagttctctgaatttaagattacagttttgaagtttggcatctgctaccacttcaaggattaaggatttactgctcactggaattcaatatttaatattttaaaaaccattcagctccagcttgcaaatgagttaaattaaaataatacacagacgttctctctgaggccgtggtttttattggtagcaacgctcattaagaaattttactggctgggcacggtggctcacgcctgtaatcccagcactttgtgaggccgaggcgggcagatcatctgaggtcgggagttcgcgaccagcctgaccaacatggagaaatcccgtctctactaaaaatacaaaattagccaggcatggtggcacatgcctgtaattccagctattcaggaggccgaggcaggagaatcccttgaacccaagaggcggaggttgcggtgagccaaaatcacaccattgcactccagcctagcaacagagtgagactccgtctcaaaaaaaaaaaaaaaaaaagaaattttacttgagccatacgttcatgagaggttctaaataagcacacagatagtctatttcagccttcatttcctacaaatgctgtatatagaagcaactttgtgtttcttttgtcaagataagacatttgatttacctccttatcttgcatttaaatttatttcacaagatggacctgttttcaggtaccataaacacccagttctactgggttttctttgactgctggggaaactgtggactgtgtctgatgcacacattttattgcatctcccctggcatgagattcatatacattggcatcttctcagagtgaagttgactctctctgtttccctattccagaatttcacttggcatatggtgattccaaaacagtttgaggctcattttgcttggtttttggcaatctcagctcagccggtttcactctgagagatctcctgtttgttccttcatgaatggccacagaagcttttgctcttggctctgcattctaatagcacctcctgcatggtctgtggcaaaggaatgctttgaaatatgcgtccatactatgtggcttttcttgctgcagtttctgttcttttttattgtaggatcgggagactcaccactagaagacgatgaagtcgggtattcacaccctagatataaaggtgaatgctttgcttatgtgctaatgaggacctgctggtgccaggagaactttcctttttgccttgtgaaacagattgtaataaagtgaccagacaacacatttaagttctaattatctatcaaggaaaaaaaaatatatatatatactcccttttttaaaaaaggaaataaagcaaaatgcattggaaatctctgaaatgctgtctttcagcatcccaatggtcattttattctcataagtttctttactgtcctcacttctgcaaaggcagctgtagctgatgaaagtgaaaatcaagcctaattcatacattacagccagaatcatccagagtaaaccacctaaggtcaaatctggaccaagtgctgataatgtactaagatgaatggggaaggagaaaacttgattttcataagctcatttcatcgtgctctttctgagcccagcatggcttctgaaacggtatgttaaagtatgttgctcaaatgaaacttaatgataaagaactccatctctacatattcccagcaatccactccccagcacgtataaaaagcctaaacaagaaccttctgtccagactcaggtaagtatgtccacaaatatttctactggtgaaacatttctctgaagcttagggaaacctgggagaaatgaaggtaaatttagagatgctttctctctgaatctagttcctcttacagtggaggaagaatttgaaaaaaaaaaaaaaatggttaacaaagtttcactgcggcattttgccctggaaatttgtcctaattcctgggatgaggacatggcccttgtttgttgtgatgtgtctcagatacaggagaatcagggtaggactggacaacttttgactggagatgtccttcagttgttttctacacaagtgaacaatatttccaatataatgactggtgcctggtgcttatgtgcaggtgtgcttcccatcacataccacatttttttgtgagatctgaatgcaaatactcattcctacctatagtttctatctccatagcctcaggaattaaccaatcaagcaaagcacaaatacgttaatcagatgcttggggtaaggaaaggttctaattcgcaaaacttcttaactatttatgggtttagatttttttttctttgagtcccttgttgaaaaatcttcctaaaacacatgcatgcacagatgacccttcacatctacagcaggggttgcctagtgccctcaggtccttgttcttcacatccatcttcacctcacagcattgcaaatgtgacaggtagaccagatggccaaaatgtgtgcttgccctagaacttaccctgaatgtttaagaataaattttcttagggcattgtttctattgtcagttaaattgcttactggtagcaatcatttcagtatgtataagtatatcaaagcatcatgttgtgcgcttcatacaataaaatttaagttttatttatttttattattattttttgagatggagtctcaccctgtcacccaggctgtagtgcagtggcgtgatcttggctcactgtaacatccgcctcccaggttcaagcgattctcctatcttagcctcccaggtagctgggactacaggcacacgccaccacacccagctaatgttgcatttttagtacagacaggggtttcactatgttggccaggctggtctcgaactcctaacctcaggtgatccacccaccttggcctcccaaagtgctgggattacaggcgtgagccactgcacctggccaagtttttttaattttaaaagctagagacaagccattattaagtgagggtttagttttagatcctgaggcccctgcacaatgtccagcacagagtaagtgtttttgaattaaagtaaaataagaaagaaaattaaatgtaaccaacatttacggtgctcctggtatgtggcaagcatggcttttgattcttttgcttggaataccatcatatattcatattaattgagtgagtttgtgatgtatgagtatgcaggtcatatatatacatacattagttcccccttatctgcggtttcactttccaaggttccatttaccttcagtcaaccgcagccccaaaatattagatattttgagagagagacagtacattcacctaactttcattacagtatattgttataattgttctatattattattagttgttgttaatcttttatcatgcctaatttataaattaaacttcatcataggtatgtttgtgtaagaaacaaacagtatatatagcgttaggtactatccaaggcttcaggcatccaatatcccccgtgggcaaagggggagtactgtatatcacaaatatatgtagtacatacagattatattaaaacccttagaggaaggaaaatttattcaaggaagttctttaggccttgtgtgagctcctacacgtttatatccacatggttaaatttaatcagctctaggttaagcctttaggacatcacctttacctagaaagtccagggaagattacttgagtcttgagtttagggctcacttgcagctgtctgcaaaacatgatatgacgaaagtattagccagaccagggacggtggtgcgtgcctgtagttccagctacttgggaagctgagacaggaggatcacttgagcctaggaggccgagactgcagtgagcaatgatcatgccactacactccagcctgggtgacagagtgagaccctgtttctaaaaaagaaaaaaaaaagagaaagtattagctgaaggaaatgtgaaggcaaaactaaaacagtggtctatgcataagacgtggccagaactgttggtttttgtaactgagaagcagttggaggcatatcctcagaagagaattcctgggaaagtaaaacagggtctgtcctccttcctggccacatgatggcggtcttacctcactcactgacagctcaggtgctgggttggagtgatgagccaggcagttgcagggaagtggctcctattcatggcattgagagcccggcaggctttagggaactcctcactgttccccatcaattgtgggacaatggggcagtggctgctgtaggaacttatccaccaaggagctagtgttgcccttatattttatggatctcaaagagaacatttcaaaagcacagcagggaggttctgatttattcatttcatcccagctgtgctttgggcaactatgagaccaaaatcaaaacacctgcaactttgccatctggggagggtgtcaccctgttacgtaaatggggcataactggggacacttctctatggagagcaattgttctgtgactttaagcgaaatttatatcttgttacaaacacctggaaattgtagcatcatttagattaatgccagtattacaacattttagagagaatgtgcatacggctcagacgaaatccaaattaaccaattattgaatccctaccgctatgtatgacatcagttgcccttgaaagaattatctaaaaaataaaaataaaaaatcttatgtatctagttaagggaaatactaaaaagaacaagcatttattgaacatatatgctaggtactgtgctagatgcttgatatgcaatttttatttcgtccttgtaacagcactatggcataagtatagatattgactcagagaggttagctaacttgtctaagatcacacagtcagttatagaggaactcagattcatgttcagatatatctgacacttagtcccatgatcataacctccctacccggagacacctaagaaaacatggggcactaattgaaggtccaaaatttggaatgtagccagcctgggacagtaagagtaaggggacacattttctgaaagtgtcatttcatatttatctcctcttttgtttctgctacttgtagataccccgtggtgctcccccatcaaggtgaagtatggggatgtgtactgcagggcccctcaaggaggatactacaaaacagccctgggaaccaggtgcgacattcgctgccagaagggctacgagctgcatggctcttccctactgatctgccagtcaaacaaacgatggtctgacaaggtcatctgcaaacgtgagtaggccagctctgtgttgggtcctcagggatgaccagagccaaagttcttttgctctgagattgaggattttcactgaatattgatgagaaaaattctccttatgatcagggggacaccagggggattctaagatatggtggaagtgagttggctcctctcagagagaatgatatgatcagctgtttgagaaaaggggagagaagatcattgttcagaaaatgagttacatttgttcagttagtgctggatcctgaagaggtgttggggatttagaaacaaataagacgcacatgggtcctgccatgaagaggctttagtaaggcagaggtgtcaactgggagataagtacaagaagggtacaaagtcagggacatatggtagcagattaaagaagagttctcctggctgggcgcagtggctcatgcctgtaatcccagcactttgggaggccgaggcgggtgggttgcctgagctcaggagttcgacaccagcctgagcaacacggtgaaaccccatctctactaaaatacaaaaaattagctgggtgtggcagcgtgcatctgtaatcccagctactcaggaggctgaggcaggagaattgctagaacccgggaggcggaggttgtagtgagccgagattgtgccactgcactccaacctgggtgacagagcaagactccatctcttaaaaaaaaagaaaaaaaaagtgttctcccaaggagtggggcttagggaggcaggaaagagtcacagaagaagtgatgcttatttatgaaagtgagtgtgcctcaagggagaagcttagaggagcagcatttcaggggctggcttttagcttcatgacaagtcatacctcatttggaaaattgcaagtggtacagcattgttgaagcacattttagatgtctttggtattcaaaacagccaccactttttgagcgcttatggtttgccaagaatttcacatacatttgatttttacagtaacactatcaatatgggtgccattatgttaacttcattgtcagggaaactgaggtttcaaggctgcagccatgtcatcgagactatgcagactctgcaactgggtgactgtagtggacaatctgctctacccagatctcctcgatgccttttactagttgtatgtatccagtacccagcttctgagtactttgctcttaaagacttggaacttcaaccttattcagaagactgctccttcagaggactgatcccactcgctctctctctctctcactctctcactctcgttctcttttcacaagagaaagcatctcctgtgagcagcctgtagctgcccaatgactgactgataaagaattatgaaagcccagcttccttgcctgggggcaggacagaatgagctgtcattcacactccagagcttccctatgggatcaggctgctgctgactttgcctgagatctcatcttgcctggatttctccccttccctgttctgctttcctcaccccctcactagtctccctgggagcactttcttactaaacctcatgcacataaatccgtatctcagaatctgcttctggggagctcaacctaagatagtggcttagctgggttgccaacccaagccagtgtgacaggaaactttgtgtcttctgtgtgacataaaaccatccattgtttcttaaattccatttgttttatttatttatacaaagtcgtgttcttgttgcccaggctggagcgcaatggcgcaatctcagctcgccgcaacctctgcctcctgggttcaagcgatcctcctgccgtagcctcccgagtagctgggattacaggcatgcgccaccacgcctggctaattttgtacttttagtagagatggggtttctccatgttggtcaggctggtctcgaactcccgaagtcaggtgatccacctgcctcgacctcccaaagtgctgggattacaggagtgagccactgcgcctggccttcttatatttaaattaacttttcacctcatgctttcagagtttctagactctgaaatgaaactctatagacaaaaactaagaaatgctgaatatctgattttctcattttcagaaaagcgatgtcctacccttgccatgccagcaaatggagggtttaagtgtgtagatggtgcctactttaactcccggtgtgagtattattgttcaccaggatacacgttgaaaggggagcggaccgtcacatgtatggacaacaaggcctggagcggccggccagcctcctgtgtgggtaagaaaatgccacagcccttaggaggcacttgctttgggaggagcagggggtgttcacatcgtggattgtaaagggagcatcactattcctcctgtaaggcctaagcatgcaactttgctctcagtagcatcactggttctctggctcagccctagatctaacctcagtgtctatcctggagctgacttcgtagctgatggcttccatctgacttttgtctttttcttggtttgctattgaggcaactacaggctggcagagatgtggcatactcctgctgattttagttcgggggcctgagcaaagttattgacactatagggacagtccagtagagaacatctatgtgtctttcagccccaatgtagcttctttgtcattgactctggtggtcagcaagcactcaatttgttcagctggaagggatttggatattttgccttactctgggtttgttgggcagtgagtggttcccatggtgtggtcctgggagcagaagcagcagtagcatctcctggtctaagaatgcaaatttttaccaacccacccccaccacctgctgagtcagaaactttaggggtcaggcacagcattttgttttttaatgagcattccagggattgtgaggcactcaaatagagagctactgatctaaggcactgcttctcaaactttactgtgcagcgaagtcctctagggaccttgggaaaaatgcagatttaaattcagcaggtctgcggtgggtcctaggattctgctaaacgatgctttagggcaaagtttctgaacctcagcatgatggacatttggggccaaataattctttgttgtggagccctgttttttttgtttgcaggatgtttagcagcatccttggattttattcactaagtgccagtaacactgcccacagggggcacctcacagatgttgctttcaatatcctccctgtgattagctatgtgcatagctcttcaaaacaaaccaaaaagaaaattgaatctactccctcatattggaaggggcagaggtgatggtgggaggagagaagctcaaaaatctttctgctaagcaagctttggcagagtactctagggatcatactgtttaaatttccagattgtgtgcaacaatggaaagaaaatgctgattgttctcaaaaaccaacagcatgtcttaagctggaccagatgcgcctggaaccttcccagaggaagagagaatgaaccccaaattcaggagattcatattacagtttgtcagaacaaggttcaggcatatttgggagaaggaggattgtacatgcaattagttagggatgacaaaaaggggtacagcgatccacaagagagcctagagctcccaggaaaaaagagagaaatgggcaaagcaagcaggcaattctttctttgattttcgcgacagacaagctgaggtttgtccccagtgaattttactccaggggtattatttacttttttggctttaaatgtattaaaatagtttaataaatttgtttttgtgttgacaggggtagggggtccttgagcgtaactcagaacttcaacctattttaggaggtgacacatagtggctaagtagttcccagatttccacacaaccttcaacagtcttggccagagctgtactgagtggtgagaaagttgtcccagttctcttctagactgtgagggaagagagaagactgggcttactttggactctgaggtggtcagttctgtggtctggctaatttgaaggtgccacaagttaaaattaattctcttacacagaccatactctggcaatgagctgaaattcatagttatttcagaaacagatatagataaaaataagtcaatgtaggaggaaaaaaaatactgcaaattgcaggagggtaaaaagtctttgaagagccacaacctccattgatctggaagaaaataaaccttagaatgtaaccactattgttttcgggggatatttttctttctttccatttttagttatttttggttatgttggcatttagatagaacaatgaacagttggaatcacaacaagtcctcatgtaaagaccagattttgagtagacacatgatctctcctttagaccaacacttcttcctaggccaaaacaggaagaaaacaaattaaagatactttaaaaaccacggacaatgaaaaaccagcaaaggtcttttgacattcagagagtatccatttaattactttaacaaaagacaatgtacaaactttcctttttgccctgtggaacggattgtaataaagtgaccagacaacacatttaagttctaattatctatcaaggaaaaaatatttttaaataaatatattttattttttgctcacttattttttgttttctacagagtagaataggtggagatttattaacacaaatgaaattctggaataaaacattttggagatgtaatatatggaaattgatggcatacgtttcttgtgtcccagctgtctcacagctggtttacccaatgacccataggaatgggatcattgcattattgctgggctgcattgcattattcagttgatgcaaacatcagtagggctaagaatgaatgtatccatgcattgttgcaaatgatgttaaattgtgctaaattcttcctgggttgacaaatacacattcttttgcaaactttcagaggctagtttcagttaaaacaacttgattgactgagatactgattcactttttcccttacatgatttgttagtacaaacagaacaggtcaacttttagtggctctctctaatataaatgtatcaccaatgaatttttatttgggcttctttcttgtgaagatgttgacttttagagatgaggtctcattatgttgcccaggctggcctcttgctatgtcgtccaggctggtcttgaactcccaggcttaagtgatcctcccacatcagcctcctgagtagctggggctacaggcatgagccaccacacccggctatgatcatgacttttaaatgtggatttcattgcctcccttcttgcctcttttgtctgttttggaaagttctctggatttttgtatggtgccaaacagaggaaaccacttcccagagccatccacagagattacgctctggctgggggaagcaaacaactggatgagttttcaatggccaggtttgttctgcatttggcagtcactcacttcctatgcccccttgaaaagaactcttcctttctctatcaccaaactcaaactattttatatttgcatcagtgatctgttgctgcacaatagaccacacaaaacttagtggctccaaacaactatgttattgctcaaagattctatgggttggaaagttgggcagagctctgtggggacagctcatctctgctgtatgtggtaatggttgaggtgaccaagtggagctggaggattcaagatggcttcactcacaggtctggtacctcagttgggaaaagttgtactgactggggtctggctgagtctctttctctctctctctctcatttataatttctcatcctgattacatggcctctccagtcaattggacttctttagatggcagctggcttttaacatagtgaaagcagaaggcaccagattctttgagggcctaggtctggaactggcacagggtcacttcccttgcattttattgttatctgttgggcaagactttgtccttttgagcttcttccttatttccactacctaccgggttagatgtgtcaaggatttccaagtaaatagttcagcttcagctgggtgctggtggctcacacctgtaatcccagcactttgggaggctaagacaggcagatttcttgagcccaggagttcgagaccagcctgggcaacatggcaaaatcctgtctctacaaaaataaataaataaatgaataaataaaatcagctaggcatggtggtgcatgcctgtagtcccagctacttgggaggctgaggtgggaggatcacatgagtctgggaagtcaaggctgcagtgagccgatattgtgccactgcactccagcctgggtgacagagtgagagcctgtctcgaaaaaaaagttcagcttcttagataaatagtagttgatacaatgcaatatatttgtatctcatattttatatgcacagagataactagagcacagagaagggagacagtttgtcagatgtctccaatgaatgtggcagagagcaaaggccagaattttcactgaaggtttcaagatttttatataattgcaggcatcctaattcaacaggggatagtaattatgtttctatagtaactttgttcctttcattcatggaaatgtataacttataaaatgctatcggggccaagtctgggtaataacaggcttaggtctctggagcatcagctgaagggcagaccagcttgtctcaccagccgagagagaaggcagctgcttgaggatgtgtcaggatcaagtcctgcagaggctcttcaagggttcatggggaagctatgacagaccatcacaaaacagtatgtgtgcaaaggttggcggaaaacactaggtcagcagcaggcagatacacaaaagggtttggtttattaaaatagctttaaaatatgtaatggcatttaaaaatcccagaccacaaagaaattccaaaagagaggaaatgcttcttcccagtctataaatgaggatgctaataacactgcttagtctaatgggtggttgtgcaaattcagtaaaataatatagggagggtacttagcatggggtgggcatgtaggaaggagtcctccaatattagttattatttgtaatgatttatttcttcttgtttcttctttggaagagcactgtttctgaaaagctaggccagttcagctgatcattgttagctagagataagctggctttgggaaactctgagactcttcacccagataacctatcttggagcctgtgtgcttacactgttagtacatcttgatacagaaaacaaacaacaatgtatcatccagacatttagtttacctgacagagactaagttgcttttcactctgaccatgctgcaccaagaaaatatggtaacacaatgtaattttacattgaaatctgtatgctaataaatatactttctataatgtaattgccagctatatttgaccagcagggggcagtcattatatacttgtctttctgtgaaatgttcatctgaattataaaagtttgtcttctatcacctatcatagtaaaaaattaaatgtttttaaaaacgtaacagctgagtatagacatcttgaatgcatttaaagcatcttccatttcatcatagtatttgtatactttattttatcaattctgagaagcgtattatttctaccttttaatatccctgaaatagggatgcatttcacaattaggagtgacttagattcaacaaaatatggtggttattcaatttaggattggtgcattaaggctgttaagttcacactccactgaagcacgacatagaatgaaaatgaatttggatagctgaaggcaaaattgtttaataagttattcgtaacttcttaccctgaataaaatgagaaattattagacaagacacaggagaaagtatataaagaattttacttggtgcatttagtctctcaaagacatctgtcattcagaatcaaaaggacatttaactttcattaaggcagtaatagcacttaatacttatcagttgatatgtaaagtaacatgaagctgaatgtccttaatttgctatgccttctttaaatacattctctacctgttcagaaatattaagtagaatttgcagaaatgtgaacttcctcttgtgatttcacttcagctataagatgaaatacaacccagtgtagagttgacatctcatttactttgagccctcattaaccacccatccttgttatcactatcgaggcagaactcctattaccaggtagagaaactacttgaagaaatttgggaggcttttggaggtccagagccacagtaaaactgctgtcccagaacataaaaccataagtgtagttcagtagcagttcaaggggagagtggacccagacagaccattgcctattttaagatattaagcaatatgttgataatagatagcaggaagagagagagcttgttccagtggcaagtgctccgacttagattgtaattcacagtgccattatctacatgtgtggtcttaaataaatcatttaagttctttgagcctcagtttgcacatctgtaaaatgagagagttgggcggctcctctacacctccatagcattcacttttaccttgcctggggcaattgccattttctacctcatgttatatttcatgtgtgataatgtaatccctccaatacatggcaaattctctgaaatgtcaggagcacatgattctcttgcctttgtgcacccccaaccccagcagttggaatgaagccttggataagattggtactcatgaaaaatttgttgccttgaattgaatctgactagatgatagctagaatgcctttctgtaatattccatgatgctgtgttcaaagcaggaagtactcactaaagccaaatgacttctagtttcagctgggtaactgccatgtggccttcggtaggcagagtttggaagcatggggaggaaaggctgtaactaatgaattacccacaggacaccttgcaaggccagttgattgcaggtttagccctgcaaatgtgagtatttaaacaatcttcaaaacttagcaggagagtaaaagcattatgaagggagaaaaggggaatatatagggtgaacaaactctttgaaaatggagaatacccagaggctttggtattttaaactgtgggtgttgaaccccagtttgactagatatttcttgatgatgatgagaatgttttggttatattttcagatatggaacctcctagaatcaagtgcccaagtgtgaaggaacgcattgcagaacccaacaaactgacagtccgggtgtcctgggagacacccgaaggaagagacacagcagatggaattcttactgagtaagtgaaacttggcagataaaatgatgctgtctcttttatgtgagatgtttactacccagagtaggggagtgtatatatgctggtctatttatgctttcagatgtggtccccctggtcactacctaacatactatatatgtcacctatgtatttgttgattgcctgtctctattataatatgttcactgctatgtccttaatgcccagaactgtgcctggcacatagttagcactcagtaaatccttactgaaggaaaaaggagaaataaggggtggtgaatgatgtgattattatgcattgcatgcctgtatcaaaacatcttggctgggtgcggtggctcatgcctgtaatcccagcactttgtgaggacgaggcaggcggatcacttgaggtcagaagtttgagaccagcctggctaacatggtgaaaccccatctctactaaaaatacaaaaattagccaggcatggtggcacacacctgtaatcccagctactcaggaggctgaggcatgagaatcgcttgaacctgtgaggctgaggttgcagtgagccaagattgcaccaccgtgctccagcctgggtgacagagtgagacgccatctcaaaaaaattaaaaaaaaaaatctcatgtaccccataaatatatatacctaccatatactcacaaaaattaaaaataaaaaaaatgtaaaagaaggggtggtgagaagaagggaaggaggaacagaaggggaaagaggaagccagttggttaatttaagaatagagccacccccattgcctgcccaggcagaccctactcatgcccccaggccattacctgcactgggaagccatctgtgtctcccaggtggtgccaaaggctgccgctcttgtgctctgtgagtacagtttagtgcaaaactttttcaccccttgttttttggctgtatttatctctttcaaagctttttaatttatttttaaaactcccgatcatatcaaacacttacagatgcttatttaaaaaaagagaaggtatcttctgctttcttccccacctctaccccattctcctggaccaatttcattcatagtttgacatgtatctgagttgctttttgttggtgtgtttgttttaccaatcacaatgagaagcactgttaagaagcttttaaaaatgggtggatccctttgtgagggttagctatgtgttgttctaatctagcatttgggcctgtacccctgcaactgtttggttggccttcatattccctggagaccactacttcatgttagcacattcatatctgtgccttaaagtttatgggcatattagagttccccactgagttttcatctgtagatgaaaggatacctctaacttatctcctggtgatccataaagcaggaaaagactttctagaatcctatcaacccaggctgtgcatgacaaaacatttttacacaatgattagcaataacagtacagtttctagtgagaggagacaggacattttgttcctacattccaataatcttcccccagtgcctcatctagcttaagtagtattactagttatgctctcccattgtaacttctcaaagataaagtttgaccattaaaaaattatttgctgtcacatacacatcccacaaattcctttggagaaaatgtaggcaatcagaattgaaaagtaagttgatgttatcagggattgggttttatttacctttgactcttcagggtctagcacaatgtctggcccagccccagcacgtagtaggtttttagatttttgcagctctgactgctgttgaaaaaacctgtgtgataaacacaaaacatcaagccatcagatgactctatttgtctacaagctttgtgagaatattcaccttgttctttttatgggtaacttgcgtaatatggttaggagtgttacattttatttgatttttttattttttgagacagattctcactctgttgcccaggctggagtgcagtggcacgatcttggctcacagcaacctccgcctcccaggttcaagtgattctcctgactcagtctcctgagtagctgggattacaggtgtgcaccaccatgccctgctaatttttgtatttttagtagagatgggtttttgccatgttggccaggctggtcttgcactcctgacctcaggtgatctgcctgcctcagcctccaaaagtgctgggattacattcatgagccactgcacccggcaggattgttacattttaaaacagcatctcagtattctcctgtccctttgttcagagcagctgtctgcttccagagttctacaacccagaggccagaaaggcttagagcaggatgtggtgggaatgcactccaacaggatgaggagttcagagaaggctgtcttgttcccttttcgctctcactagggctccttgctgccctggcatttctcctatgaccccttccaccatttcctatccaagctactgctctatcgctcccttgtgagggagaaggttctagtgtcaagctctgagacaagtgcttcttgtgagttcccttatttactccttctgttatttgcatgtcacaggtgaaacaaagtctcagaaaggttacatccacttatatttgaagtatcactcctctcaggtttatctgaatttaaactgtgctttctaaagaccttaaagcatctaaagccaacagcagcatgtctcaaaatagtgggatttctgacattttcccaagacccctctctcatacctggtaaacagccacctcacccacctacatgtaaggctttcctcaatggtgacaatgataattccacgtgttcattattagcaaatattctcatcattcccagaactgtagggagatggggaattatatgtatattgaaaaacagaacgtggattttgatcctgctatacttattggtgtcctcattaggcagccaagaaaaaagataaactcaccctagctgtgtgaccttgggcaagttctttagcctttttgtgcctcagtttcctcatctgtgaatcagagataatactacctaccttatagggttgttggattaaataaggaggattaagtaaatatatgcaaaatgcctagaaccatgcctaacatgtaaggtttatgtaagtgcaaagaacactttttgtcattattattatgttattaggataaccaaggaatcacagagaacttgcctttaggtctccactgtcccagacagaaagaacagagaaagttctagcacccacccccgccccgcaggcccaaattgccagtgactgcttggactatattctctaatgattttcctcacagaaaattccctcgtcttcccaacagtgaggcaattcaggtcccccctggaacaagagtgagattgaaggaggagacttgggccctatatttttcatcctccctcccccctctacccacttccctaccattctacccttcagcaagaaaaaagtctaagcttcccagtagtttgggtcttccattttctggtcacaaactgctcttctaaaacagactaaagcttaggagattctattcttcaagaaatttttgttttatttaaactggtctaatggttgcccctcagtctctccatgtcctgtaaagagtaggggatcgtcacttgcttgtcaggtccataatgtcatctttcctgtttctgattttttttctctaagtgtcattctaaaaggcctccccccaggctccaactttccagaaggagaccacaagatccagtacacagtctatgacagagctgagaataagggcacttgcaaatttcgagttaaagtaagaggtaagagtactgcttattggttttgtttccccctctctttagaagagcaaagggaagtaggtcctcaagccagaactctctcaagtgcctactgtggtgggagacttgccagctttagattagtctctaataaggcttggggaagtgccctatcttaatgcctgaatttcacgatacacatccggatgggcgtcagtgttgccagattatttaaggagttcccaggactagtcttacaggatcccatagctgactgtcctagaagaatattattcaataatttttccatccctgagcttaggtggccagctgaagcctgtgagtccatctacaaccagggtgaataggagccccctaatttgggccaccaggagaacatgtttttagtgttctagtaccattggtatgaaagaaaatgtttttaaggattattttatgcctgatggtttgggcaactaattgctaaccatctttactccttactcttctggacttcacttcctcatctataacactaggggcgaaaccagttgatatcagtggtctcattggtatggatggtgaccattgcaagactcactcactgaccaaatagtcatccctcctccctcactcatttcacaggctgatgtagaagcctgattgcaaagctgatgcctctgcatcctcaccttttctgcttactctgtggatgggagctcagcactgagacccctctggacttgtgtccctacagtcaaacgctgtggcaaactcaatgccccagagaatggttacatgaagtgctccagcgacggtgataattatggagccacctgtgagttctcctgcatcggcggctatgagctccagggtagccctgcccgagtatgtcaatccaacctggcttggtctggcacggagcccacctgtgcaggtaggtatgccgcccctccagcctgcagcagaacctgtaaaccccttggttcttgattccagtgcaagagaggtttcccttcatatactttgagaagttcatggccatccctctttatctgagtggatgaacatagtccctagatccctgctgcagctcatctcatctgccatccatcttgcccctgcctatcctctaatttccttttcatgtcctctaaggaagaagctcaaggtaggaacctagggccagcctttggtgacattatgaatcagcaaaatttgctctagtttcctttgttctagaaatgtaaggatcttatttataaagctagtaaattgccatgtagagacaatatcatacctgctttgcatcactggcatgaaagttacatagactttgggcatttggaatctttcctcctatgtaaaatgaagaaaataatacctcatctacctcttgagttgtaaggattaaatgaggtcatctgtggaacagtggaatagagcagtgcctggtacaggcaaagccttatgccagctcttattcctgatgaagaaaaattgggctgggtaatgagtctgaaacttggactagccagaaaattatgtatgtatctcttgtttatagacttctctttttctcatttcctggcaccctttcatctttatcactttcttttaattgaagcccccatttagagttaagtgacagagagacatatataccatcagctaaatgcctgagattcttcaatttcatgtattaaagtagaaagaacacacctattatagactccctacctaaggacttcatgcccaccacctatgaggctattctgaattgagatatgctataagtgtaaaatatataccaatttcaaaatcttagtgtgaaaaagaatataaagtatcttaattttttatattgattacatgttgaaatgaaatattttggatatattgggttagataaaacataaaatcatttctacctatctctttatattttttatttgtttgtttgtttgtttgtttgagatgtagtctctctctgtcacccaggctagagtgcagtggcgcgatctcggttcactgcaacctctgcctcccgggttccagtgattctcctgccccagcctcccgagcagctgggactacaggtgcctgccaccacgcctggctaattttttgtatttttagtaaagacggggtttcaccatgttagccaggatggtcttgatctcctgacctcgtgatctgcacgcctcggcctcccaaagtgctgggattacagatgtgagacactgcgcccggtctctttacacttttttaatgaggcaactagaaaatttaagattaaatatagtggcttacattgtatttctcttgaccagagctatcctagactctgagtccctggggcagggaagagggcaggaaagagggcaggaactgtgtatcactcagtgtgacatcctagtacctagcatagagcttggcacatggcaggcactcagtatataatggctgaatgaatgaatgtgtgaatgaacaaatacttcaatgcaaacctaaaatgtgaaatatgaaaaccaagattataaatcatacatggcatctactagtttttctcttattatttcttctctggggctaagccttttgcttgcctatctatacgacatccttcattgaccttgaacagctggaattagttgtcatttatttgcttaaagggaagacctattataaaaccgccttgtcccatgtcctgtttgcctgtgttgtttgctctgtggcctttgtgccccacattgctttgtcccttctgcaccaaggaggcagacttcagagattctgagccattccaaagccagcctggccactgcccattctcttacccttctgcctctctgcacccctttccccagcagatactatggtgcttggcccatatgcctttcacattcccatctgtgttcaaaaggctacttactgcaattaactgggtctgtctgtctgagagcatttctttcctggctatgaaagcattgtcagcccatgcacagagccagctggaagtgatggagagttagtgccccagaagcagccctcagcaatgatggagcaattgtataaatactccagttccctccagtgggttaattctggaggtatgttgtatatcatctcctagagttccccagtgggagtgagttccaaatgcccacagcaaaaacttgcttgataaccaattggtattgttttctttccttcactgtctcacttcctgacatagacagaataatggtccaccaaagatgtccacatcctagtccctggaacctgagaatatgttaccttacatgaaaaaagggactttacagatgtaataagttaaggattttgaaatgggaagagtatcctgaattacccagtgggcccaatgtaatcacaagccttcttatataaaggaggcagaactgatgtcagagtcatagaaagagacgatggaaggagaggtcagagagaagagagatttgaagatgctacactgctgtctttgaagatggaggaagggactactagccaaggaatgaatgtggcctctcgatgctgaaaaagacaagaaatcagattctcccctagaacctccatgggagcatagccctgccaacaccttgattttagctccatgagaccaggatcttttagatcctgacctgcagtatctaaaagaataagtttgtattatgttaagtcactaagtttatggtgatttgttacagcagcaagaggaagtgaatatacttccgtactcctccacaggcgcttcttgggactgcctcccaaataaactgtttacacttgaatccttatctcagggtttacttcttacacaaatggttctgtgtgtcatcataggctctgttgagccagaacaagtggaaggtttctgacccatgtggccatttctgattacagccatgaacgtcaatgtgggtgtcagaacggcagctgcacttctggatcagttttatgagaaaaggagactcctcattgtgtccacacccacagcccgaaacctcctttaccggctccagctaggaatgctgcaggtgagtcctcgaggcagggccaaggtgagagggagacctttaacaggaagggcccagccatttcactaaaagcaaaggccagattcagtgcctaatgcacttacagtgagtttcaggaagtggcactttagagctaccaccattcatttctggttctgggccataacctgattaacattgactccttagagttaacccaatcgttttccaactaatgaggtttgtctgtcttcaccaataagtctaattgacatgctgtccaggcctagccacagaacaattgtctttgccaaacctgtccaggatatgcctggctggaagcaatcaattggttgcctgcccacatttttccccagggaatttctttgactcagagggtgacagccattttttcttagaaaagtggttctcaacgtgtgatccatggaccggaccagaagcatcagcatcacctgggagcttgatagacatgccaattctcagggcccctcccagacctactgtgtcagaatctacacttttaacaaaatctccaggtgattcctaagcactctaaagtttgagggtcacttttctgggaaatgtgtccttctcagctatgtaaattttgtagctactaaatgaggcaaccaacatcttgggtgtgtggggaaggctgactagaaactgtaaggatcaaactagaaattgcttgcttttgtcctgaggctggtttgcaaaagagtggccaacttcactgaatactaaagaggcaggatgtatgctgtgccatggatacagtgctgcacatttttttgagactattttattcatttattacagtggatagaactaagtgcttagaacagtattgatttaatcaaaggctacaatttacttctcatatcagcattaataaaatggataataataagtctcttttcactcttcccacgtacttgaagaattgcctatgaactctgaagagccatataaaatttttgtgagttcccttgataggaaccaaattcattgcatctttacccctggtccccaccagcttacctccccttgtatctccttgtccaagccaggggcttgctcttcagaaaacacaagcttatacctctgtcttttgtgggaaactggcattgcaggctatattccatgatcatgcatttcctcatctcttcttattccataggaaaatgaattaagccaaacaacttgcttttcctctgtgtcagcaaactatggtgacccatggctagtttcggtaaattaacttttattggacacagccacactaattcatttgtgcatgatctacaactgcttttgcactacaatgatgggtgaagtggttaggacagaggcaatccaaccttgccaagcctgaagtactctctggccctttacagagaaagattgccatcgttgctctagtctgtcccatcccttcagacacttgctaacttaacaactggttggataagatattttatatcaagatgttttggtgtgccctcctcctccaaatatacttacatttgcattttaaccagagccttcaaagaaaggtttgattgacttaggcatttcagtgagagtaatacaaaagtctatttctaactttttaaacttttcaaccagttctgtaacctcatatagggacgtttcagtggaattttggtaaaacatatttgatgttttcgtctttcaagacttcaaaatttcttttcccatttagccaaattcatcatatttgtcttacattactttttttttttttattgccattgccattcctgatgagccctcctcgtggttgactgggccacattcccaaggttcttgccaagagccagcttagaggcttggaaccttttatcctcttttcccctgggattgggtgtggagggcatagggcaggggagtgtggagagtggaaacagggcagagaagtggactctggaaatagtcttctctccttgcaaagaaaaattagaatcctctggggtggtcttggatactttttaggaaatttgactcactcaaggtctcaccctgtctggaaatacatagactgcccttttgcttaggttttcaaaatcccactgtcaagccatatctgaatgattcctctagcaaaggtatttaggttttatagccactatcttaaccccaatttctcatctgttttcaggacagttcagagtgagcaaataaacttccagagacaggccagtgctgcttctgtcggtttctagtttgataaggatgtcttttttagccatgctcatacttcccctgttgggttttctttttcccagcaagcacagtgtggccttgatcttcgacacatcaccgtggtggagctggtgggtgtgttcccgactctcattggcaggataggagcaaagattatgcctccagccctagcgctgcagctcaggtagggggaagttctgttcttaaatcttatcccctgtgaatgcatttttaactgattaggttccctggtttctttctattcaggattgagttcaggcaaccttcaatgtttaattgcttttattctgggagtgttataaccatactaatcagtatgttgctgtttgttcaaataaattgtgcagtgggtaattaccagtgttctttcttactccctccaaccaaccgtttttgcttcatgtgtgtgtatgtgtgtgtgtggttggtggaggaaggatggttaggagaggagcacctgaagaaaagacttaagcaatcatggtcttattagaagagcatgcatccaattagacttcccaggcttggtctcttttttctccatgcttccagaacacttgttcatacctttattttaacaattatattttagtttcataacccttacaaagttggagccatggattttagtctctgaataatgatgtattaaagaagcagaattcaacaaccaaaaggtaatttcagaataacccaaatttctacttgcatctcttgaccactgtgaaatcgataattaggctaaagcaaaactccttaaaatcttcctttctcacccagccttttctctcacacactgcatgggagagtacagatctctgttttcagggtcccaggctgctccctgtctctcagggcctcaggcagttacaaacatctcgaacacgtggctttcaggcttctgcaaaagtggggaaagagagtaaaaactcacactgactcctttatgcttcacgttggaggtgccacaccttgctcactctcttagttcattggccagaactagttacatgattgcaattcacttttaagggaggctgggaaatgcagtctttctgtattgccagaaagaagaaaatgaaatgggacttggtaaaccctatcacacctgttcagaaggcacagaaattccttgagaggttatatgatagaaacatatccttagcaaatgatgctatagatagacacaatagcttctttctctaatttccctgttttccagctgcctttgacccatcccatgtttgatttgtaccactttccacccaaaaagattctgccacattcctaccaaggtaaaaaaaaaaaaaaaaaaaaaaaaagaaagaaagaaagaaagaaaaaactcagagggccaggatggaagaaaaataagatgattcatgagttctctttagtcggctgatgaatggagaaggctgggtacactcatatgcttttgtttttgttatattttactgcatttgcatgtagcacctccccataccgacttcagtagcagagctttcaaatattggctactcagtacctagcacagtacctggcaccatgttggcgctaagtggagtaaatgactcaaaatttcattgaaacagccttactatttccagaggtgataatagcttttaaaagtatattgtatatctacagttagtatacaaatacttcaagttgaagtgtacaaaacttaagacagagagttgtgttgatatctaaatatttatggtgaatattttcaaagtaggttttatgaagctgttgcttatttagaactacttgctcatatcctgtgtcaatgattttttaaaacttgttgcagaattttctgaatggtctttggattgaatgtgtgtgtatgtgtgtgtgtatgtcatcttcataaaatcttgatgtgattttaaactgtttaatctacttgaagaacagaaaaatgtgattaaaaaatacttgtcattcagattgtatatattggggctaccatagacttctataggctgaagataatttttaaatacattatgtcgtggttctcaaatttttaacctccatcagaatcccctggagggcttgttaaaatacgtattgctggagtctacactgtaggctctaaactgtgtttctgattcagtaggtctctggtcgtacccgagaatttgcatttctcgtgagctcccaagagaccacatggtgaggaccactggcctagttttttaccaaagcctttacagtttgaaatagaatttttgcccagcagccttcaaggaaagggtcaatcactattttgcagctggatgatagtccaggtaaatgtcatacagaaatgatcactcaggtgcattacctaatggattctgtgtcaggccggcatgcctgtgttatcaaacatatcagtgagaaacaaagagcttggcagaactttttccctttgaattggaaaggtgttttttagacaccttggagtctagtgcagaggaaaaaagatgatttaggcaaagaatgggaagcaaaagaggagaaggaaaagcataatgcctgcataatgtaaaaattctcttgtctggctattttcaaatagcaccaaggccgtgataaaacccttgaagggagtcaacagaaagaagagactgggtgcctggggttgcagggtcaccgcctaccttctttcttaccctcatttcttttttatctggaggtatgatctgattcatgctttccagaggaattttccagcaatctcaaggaagacagggaccaagaaagccatagtttctatacccacattattctttgagtctacagtgttccctggaagactttccaggaagaactccttccaatctgacgacagacacatatgtaactcaggcatactgtcggcatcacacctcatccccgattttgtgtggtgtttgatcattcatccccaagatttctgtggtctttcggccctagtgggatgcattcctgtggctgctgctagcctgctgatccaaccactcagctcttcccatgacagttttccctctttacattctgtgtcaatgaaggcacaagacttacacaggaatgtgtatggtagcagatggtggcaccgtggtggtggtggtgggggttcccatcctagtctcacaagcactataaaaaaaatgaatgctccaatttcttattggtcaccctttcccacaggcttcagccaccacattccctattcctctgtttcctgagagctccctgtaccagaactcctccacgctcccaaaagaaaactcaatatccttccccttaaagatgcagagcattttatctcttcattcacacctttgcagcctacattcgcgtgttcagaactcattaatgcactttgcagtcatctacttctgagctcccctcttagcactgcaggaaacctggcagaggtattgtcatgtcctctttatttcatttctagtcactgggagtgaactggcaatttagctccccactgggataaaatacaaattattcccttcttcctcgaaactccctcttaaaaggcagaaaaaagtagtttgtgttctatgtaatgattttttaaccttgatctgtttgtatgaggaaaacatattttactttaaatccagatggcagtgtatattctgcctcatacataatctcaaaatatctaaactgaaaaaaaaatctggagaagagactgagtgggctcatttattcattgggctcagcttatctgtttgtttgctttctctagctattcccatctaaatatgtttgtgttgatataaaaatcatattttttagtttaaattctagtgtggtagagcagaaagaacaccagacacttgaaaccacttcatattcttttttggaattatttggggtacaaattatgattaatcaagtcagaatacatgggctgtagaccaagctcaatcccttataactctgcagtcctgagctggccactgaacaggccagaactatcatgctgggaaattatatcaatcagctttacctagcccagagtttctcagccttggcactattgctatgtgggaacagataattctttgtttggtggggacagttggctgtgcattgcaagatgtttagcagcattcctggcctctacccactaaatgccggtcacatcttcactctccactgtgacaaccaaaaatatctccagacatggccaaatttcccctgggggtggggagcaaaatcacccctgttcataatcactgactttgtcctagtgtgtatgtggtcgtgcaacactagtcagcaaacgtgggttttgggttgattccaaacttggattgattccaatttaataaaaaaaatctgttagccttgtatgcaccttgtaccaaacgttggtatgtggcaccattgtacgcctgaagtcttcctgactataatctaaaaccaaagcagtgcttttcaacctctcaggtacataccagtcatctggggatcttgatagtaatgcagacactaattcagtaggtttggggttgggcatgagagtctccatttctagcaagttctcatgtgatgctgctggttcaagggtcacagttggagtagacagggtctaaaggatgattcagtccttcattgtatcaaagctttctctgcacactgtcacagtaaggctctggttgatccaccaggacccttgggagtcatggtttgacttagtctcctcttttctttgtctgccacaggctgttgctgcgaatcccactctactccttcagtatggtgctagtggataagcatggcatggacaaagagcgctatgtctccctggtgatgcctgtggccctgttcaacctgattgacacttttcccttgagaaaagaagagatggtcctacaagccgaaatgagccagacctgtaacacctgacatgatggttcctctcttggcaattcctcttcattgtctacatagtgacatgcacacgggaaagccttaaaaatatccttgatgtacagattttatttgtaattttaaaagtctattttattatgagctttctttgcacttaaaaattagcatgctgctttttgtacttggaagtgtttcaaaaaattatatgaccatatttactctttctaactttctttactccatcatggctgcttgattttgtagagaaattagaacccataaccatacacaggctatcaacatgttattcaatgtgacacctaactcttttctattttgttttttaagtaagacttttattaataaaacaaaatgttttggagcaaattt

SEQ ID NO: 147 - DNA, 64038 bp, Homo sapiens
gggggcggcagctttgtgctttttagtggccgcgtcccaggatagctggaaggttaggacgctcttgcggtcccagagtggagtggaaggtctggagctttgggaggagacggggaggacagactggaggcgtgttcctccggagttttctttttcgtgcgagccctcgcgcgcgcgtacagtcatcccgctggtctgacgattgtggagaggcggtggagaggcttcatccatcccacccggtcgtcgccggggattggggtcccagcgagacctccccgggagaagcagtgcccaggaggttttctgaagccggggaagctgtgcagccgaagccgccgccgcgccggagcccgggacaccggccaccctccgcgccacccaccctcgccggctccggcttcctctggcccaggcgccgcgcggacccggcagctgtctgcgcacgccgagctccacggtcggtgcaagtctttcttatcggggactgggactggggcgggtgcggggatggcggagacgctgcctgggcccctcggtcgggagaagacgagagctgggaacgttctggcccgaccgccctgcagcttgggcgacccgtcgcagcaggggctggcacccacttgccccagggcgcgcggggaggcgggcgccttccgtgaggggtgcgctgcggacacgtgtagagttcggggaacttcacctctccacgttagggtttaggattcggagttttaggaagaggaagcccaatagttttccctgggtgaccccttttccccaggcatgcaagaactttgaggaacgccaagctctgtggcttgctccagcgccttcttgtgaagttggctccacagccttttcttactggcttgcttttcctcccccacatctgggtctgggtatgccaagggtagccaagggcactcggtgtgagggactgaggtgtttggggaaaccccctgtgtagctagttttggaaacctgcctgtggaggtctgggcgttttgttctgtgctcgcctttaaaggacacttgttgcttctcacgtgcagaaaacaagggctgcttctagataatcaccctctgtttacatcatcctaatggctttcccctgatagagttgggggtgggaggcatattaaactcaggcgttgtctctaaggagagttgctcatttcttaaccagagagcaaaacctcagaaaacttgtaaaaagttcctacttttacttgttttttcctccacctgtagttgtctatgtgttagctaattgagaaacaccttggcagtcatttcatgtaaattgaatgctctaaactcatgccattttgataaggtctgaatttccaaattaccaattacaggtgaactttgatcctgagagtctcatatgttaaatggttaaagtgtaagcgtaaggattcagtcctctttcttaataatagtttttgcactccccaaactctcagattccaaacaggaagaatgctgaatctatagaccatgtccttcaggtctgaacctgagatgcttcactagcgctatgactgattatgagtgatgattcaaagcacagcctgactcagattcctggaaatgagctacagacccaccttggaagaacctgcagttgaggggcttctttcatttggttttgtacttttcagccaatgataatatgacatccacaggcctttgccaagtatcccttagttttgcagcttaacatgtgtggagagctgatagagaagtcatcagaaatgatttctgtagtggtgtcattgttggaggaggaaggaagggggttttaatgatagctggctctcatgccttaagaacccacagcgttggccttacctcctggcataatcagctaaccaagcagaccagcatgctaacgttcaaagcaccacaggacctctgatgagtagagcagtacccaccgtagccaggtcagttcacaggtcagttcccagccgactgtaaccggcagagagccattccatttctgcaaaggccttctctctctcatttttaagaaagctgttattgaaggttccctttcatttgggaagctggaagacgttagtcacgaaacagcacaagatatgaaagtatttcttctcccccctgtatctgtgatccaaaaaggaggatgacaagaagcttttctcttggagtcctggtgttccctttggaatggaaatggtgtcatttcataggtctatcaatttttggccagatactcactccagattataagaagcaggaaaaaactgcaaactgtttataattaagtctagtcagagctgacaaatacatggcctgcctctagccttgaaaaattgatatttttcccatttaatcagagtgagtcaagtcctataagcaaaattatgtgtcctgccatttcttggctttgaaaccttgacctaaatacttcttcaagactctggtttccttataagtaaaatggagatattgctcctgcctacctagagtcgtaaagctcaaggcagataacagatacatatataataagttactatatgtaaatactattattatttcagagttcagggggaaatctctggggaaggcaaaagtatccaatactcgcactttatatataccctatactttctatgcaacttgaataaatcttattttatccacgtattggccaaacctaagctttactgatttcccaagataattgtcaaaattcctaaaagtggttaacatcaaccttgaatacactcagaaaaaggattcaattttattttttactttttatttatttaatttttttttttttgagacagggtctcactctgctgctcaggatggagtgcagtgactcgatcatagctccctgcagccttaacctcctggactcaagtgattctcccatctcagcctcccaagtagctgagactacaggcacacgccaccatgcctgtctaatcttttttatgttttgtaaagacagggtctcactaagttgcccaggctagtttcaaactcctgggctcaagtgatcctcctgctttggcctcccaaagtgctgagattatagacatgagccaccacacccaaccaggactcaatttttttaagattaaattatgacctgggtatatacatcacagacacgtacacacaccaccgcataaatcagattatgtcttcatttgaagattcataaaagcctacagaaaaggaaatatataaaatattgaaataggatgagctatttttaattatctttgattattccttattaaggtctcctagacttcctggacaggaaggaccacttgctctctgcaagtgacttaaaaataaataaataaataaataaaccacaccagatggtctttgaaaatgtctaaccaccctcctgagtctattgcttcatctaaactctggagacttctttaaaatattttacatacaaataaagcacaagaatgagagacaggatggtttagtggttaacagctccggctcagagttggactgacctgccttagaatcgcagtgttgccacccatcacctgtggccttgacaagctgcttcaccctcctgggcctctgtttccctatcttcaaaattgaaccgtggatctaccccacaggaccattgtatggattacagggcatcatgcacatatagtactgagtacagtgactggcataaaataaatgtagctatataggatggttaaaagatagcatggggacaggtgtcccttggaaaccaaaatactatgactagcctggaaaagttcattactcccatttcattcatcggcaaataccgtattgtgatgataatttctgagaaatgaaaaagcaaaaaaactcctgtaaaaaatttagattttacacattaatcatcaaggttttcaaaacaaatgtttttatcaattatttcattcttaattgaaactaaaattgttagatgtgttaatggtgttaaccagagttctcattaacatttcataacactttagatggctacctgtgctgcacttcatccctatgttcattatttatcatatgcaagacagcacacattttagaagattcaatttttacattcgataattttattttatgcctcaataccctgtaccctttactcagcatataatgccttttctctttcattaaaaaatatgtttgtatctcaactcttgaagatttttgtaattcaggttcttatcagcctgaatgtagagaaagaagtaactactacttaaaggaaaaactgacatagcctcatccatattatgatgtagatataagtatagctatgtatagagatgagtgagagagacaaagctagagagatagggagatggagatagagctagagatggaaatagagacagagatagatagctatagagacggaaatggagacagagacagagacggagatgacagagatgatggagatgatggagatggagatggagactgacatagaggagatagagcttgccctaatagagcttcagtttttttctggttttgctctgtcatagggtaacctgatatacatatatcttatctaatcaccaaatatatcctgcattttaattgaatcaataaataatcattgactatgatctttttggcaactgggttttggaacaaaaattatttttccttttgtttcaggtgaaaaaaaagtgaaggtgtaaaagcagcacaagtgcaataagagatatttcctcaaatttgcctcaagatggaaaccctttgcctcagggcatccttttggctggcactggttggatgtgtaatcagtgataatcctgagagatacagcacaaatctaagcaatcatgtggatgatttcaccacttttcgtggcacagagctcagcttcctggttaccactcatcaacccactaatttggtcctacccagcaatggctcaatgcacaactattgcccacagcagactaaaattacttcagctttcaaatacattaacactgtgatatcttgtactattttcatcgtgggaatggtggggaatgcaactctgctcaggatcatttaccagaacaaatgtatgaggaatggccccaacgcgctgatagccagtcttgcccttggagaccttatctatgtggtcattgatctccctatcaatgtatttaaggtaggaagtaaccacaaatgtatttgcaaatttaaacccatgctctgattccacgtggagagttgctgcagacttttctgacctttggaattttatctgtgtttttactgagagctatttctgctgtcttctaactactagttttaagatttacaaattttattatctgtcttatgttacacttagtttctaccttaattgtaacaaaatagtatttcagggatgatggttcaaaatcatggtgtttcatgacttggattctcatgccacccctgggcttgctggttggataggctgtcttggcaagatccctggatttttatgaaatgcaatttccagagtgagagctactaggcccagaaaatacttgaaacaaacatatccttgagtttagttaccgttgaatatgatgctgttcagaagccagatatctacagtccagcttgaaatgaattgtatttattttattttgactgtctagattaatgattaaagccaaagggcatcctggcttttctcagtgatatgggtgacttagagataatggggtccacatgatagcaggccactgttgaccttgctgagcagcattactaactaataccacttaaaatttgcctgctttactgtggtctccttcatttcttcagtctgcatttattgagcacccactgtgtgcccacccctgagctaggcagtaaggaaccaaaaagaaacacaacaaagtcagtgcctcagtgtgagaggaagataactaaccttgcttacagactgtattaggccatttctacattgctattaaaaaaaaaaaaaaaaggctgggtaatttataaagaaaagagatttgattggctcacagctctgtaggctgtacatgcatggctccagcatctgcttctggtgagggcctcaggaagcttccaaatatggcagagggagaaggggtgcaggcacgtaacatggcaagagcaggagcaagagagaagggggcaaggcaccacacttgcaaaccaccagatgtctcgagaatcactcactaatgcaaggacagcaccaagccattcatgggagatctgcccccatgagccagacacctcccaccagttcctacctccaacattggggattacatttcaacatgagatttggaggggacaaacatccaaactatatcagagactacttagacccaaaacaaactaaagccgaaggaattacatattccatatttggtctagttgttgggagggaaaaattgctgcaagaattcagatatactaaaattcaaatgaaatggcctgatctatgccagattttatgaaatgtgtttattctaaacccaagaagagtattttcctcagccttgttttttccttctatgtattatgcatagaaagcaactattctaagaggtaatattctgaaatattactttaaatggcaagttttgtcaattgaagatacaacacattttaagtaaaacagtaatctctcagtttccaataagtacacttaagctgtggttaaattatattaccctagcagaaaaatcagtggtctgataatatagatgaaaacaatggttacaattttgacattgcaaataaaaacttcccaaaattacaccagtacactgtttccaaaattgaagagattagagaacaaacaatcaaaaaattaccatctctttccacaggatagcataaatacatgtgttttctattagagcttaaaataggaatttagaactaaactatgatgcaaaattgaaaatgtgtaattgatttaaaatgtttagcatatgctacataactttaatcttttcttttaaaaagttttctctttatgatatactatgtgcacacaaccacttgactttctcctgacatttctccttaatgataaattggaaaattcaaattttgactcttcagccatcagagtgtggagtatcaaacattgattattcaaacttatgaactagtgaaccaacccatcatggctcaagaaaataattatccatctctgcatttataactccctgctgctgttcaccctgaagcacactatgtagacttgccatgtgcaaagcagcttcttagccaatcaatatccacaactgctgggaaggatacctgcttatctctttgcggtgctactgccaatcaccagactaaacatcatttctattccatggcaacgttttaagtcagaccatctggaatgtctccagatttggtaaaaatgcaaataaaactttgctttacattcacctagcaatgaataaaaattaacatattcttatttgaccatattgttctcccctcctgggaatccaatactttgtataccttactgtagttctaaataatgtggacagtttgactggtacttttacatcataggtaggagtacatttgtgtaattcctgtttttccaaaactcgtaatgagtcatttaactatcattaattttagaaagtaaacctttaggctaaaaaaacaaatactctttagttatttcaatctttttccagaggaaaagagaaaaaagcactggagtgtgctaaaaaggctcacagtatttaggagcaatcgccacatctttctgtcatcctcttctctaggtcatgagatcatacatgttgctattcttctgacttctaagcaggatactcaagagatccttccaagcaatgtgagtcacaggcccccatccctttcccccatagctgcctcccatagtaaaattctgtgggagtctgtcacatattaaacctatagattcctctaaccatatcaagttcactacctctgtattgcagggcaaggtagcagctgtccatctcactttaccattacatttatgtagctatgaaaataatgcatacaattggagaatattcagttaaagggatgtgtgagccttctttatttccctattagaaggattaggttgaaagaagaataaatagttgaaagtatctaatatgctcttcaaagaaagatgagttttgaatcacacctatttttgtgtttaacaattatattaattgcttttcttttttaatttgtataaatttatggggtgcaagtgtagttttgttacatgtatatattgcatagtggtgaagtcaaggcttttagggtatccatcacaaaaataatatacattgtacccactatgaaatttctcatcatccactcttagttgcttttatgctcagttctaaggtgtctccagacagacaacattgctttgagtcatatcagagtcagcataagtggaagtagactatttaaagattgtattaatatctgaggcaagctagaattactgataagactgtaataatgttacaagaagaagaagaaggcactataaagtattcttcctattaacgttttattccctttctctcactttgaaaaagattgtactgaaacggtttcatagagcaatgtaatataaaacacaactgaaaagtaacataacaggtatcaaacagctgggctgtttcggatgtcattaacctgtgtagctgatgcttggtggctctggatggcctgtggcatggaaggtgggatggggtcattccacccctaaattttcagaaatttcttaatttcttaattgatctccctatcttcagagcttcttccccataacatatccgggactttgcttccatctgtcaagtgccactgcttctaaaaaagcacccaggagctcccacctgtcccccttttcccccatgtttagcaatcaaggccctccacactttggccatacttcacctccttcctactaattcccaaaatgcatggctcagctctgtcaaaatgctatcactacccccaaggaacatactttgccctaaataacattctcagagagactgaatgtagtcaccgaattgctgctgctgaagcatttacagatcctagtttgaaaaatgagttaggcctagaattatatatgttgcatctaacagaaataacccaaaagatgaaaagaagttcctatagcccttgcttacatacactcacacacacacacacacacacacacacacacacacacacaacctgatgataaaagaaactcagcaatctaagaaagtaaaatgcaaggcagaaggaaccaaggcaagccaatgaatgccagttgccttcttggttttgaaacacaatggccttgcaaatgctaatgttgaagaaaaaactatttctaagattatcaaaggataactgatttttagttgttcaaaataaggataatattactaattgcagtagaagattgacaaaagcaggaaggaggaagggaaaggagttagcagattttttcatatacccaagcttataacccatactgctggtggattcattcttgtcaataaattacattatctgatatcctaaattttcaagaaaaacaaaaacttagccaagtaaattaatctgtacataggatatttacatttgttagaatggcaaaatagttaaaacattgtctccatgttgggagactgaaaataacccctgattactagatgacaaaatagataagtatagaatttaataattatattatttaatgattcatgagattacatgtatgccatagagtgttgtccatagggagatgggttataattttgaacagagtggaagccctaaaagtgatatttgtgcatgagccaaggcttggcaccatgtagcttcaggataacagctccgccattatgcacacacagacatttccatatatcactgtacctcgtctcttaagcagaaacaagaatgcagggagatgtatgtatgagagagatggagtaagggaaagaagtaagaggtacagtccaatggcttgccatagacgcttttgacgtgcatagcagggagttgatgccgtggataatatgccacgtaaatcacgtctccacttagcatgtggcacaaagcagatctgtgagaacaacagtgatagaagccggtaactctgttgattactaattttgtctaccctaagcaaccaccccttattgaggacaacaatgaaaaataaacacatcttatttctgcatgaagttaccacgaatattttgcaatgaaaagtcaagactctcaatatgttgctctggcagaggatctgaacaatgtggaaatgagagacatccacatagagccagttatctccatgttcacacagcctttgacatcttgtgcaactgggatccatccttctggggcagctttacaaaagctgcttcttgacatatcaaatcaccacagcaaattgtgtcttaaaaataaattgtcacaacttacagattagatacctcaagcatagtagatgttcagtaatgcttgttgttatgatttgatttgataagggccttcactcttaaattaacttcaaatcagattaatctgagatattcaaattaaaatgatgatgaaggtgggggtggtggtggtgatgatgatgatgatttgtcaaagggattcttcatttatagacaaggcagaagacattatcagtggtatgcatatactattccccaacttagtcaagttacccaccaaattccgtatgtgataagcatatttcccttttaccgcatcatcaagcaaataaaaacacacttttctcatgtactccaagaatcatgctatcatcataaaattagctatagaaactgcattctctaaattttaagagagaaaatgtgtcccttgaccaagatctctattcctcactggtgcattgtattccagctagatgttttcccatagggtagctctgatgctgcctcctctgtgagcacctctctttccatgcttttccgctacctctctatactccagctaacctggtctatctatctgagtccttctacctggaatatggtccttctacctggaatattttttcctcaggccttctctggcttcttccactttattccttggatctcagcttaatcatctctttggcaagtatccatgatccaaactgggttagtgccgctcccaagaccccctttattaaccctgtactggcacttaaaacatactctattgtatttgccagctccttggcctgtctgcaagttccttcaggcatgctgccatcattctcatttatcactgtatctcctgtgcccagctttaaaaatattaggtaaatgagtgaaaaaagaaaatgtactatagttgcctctgttagaatgtttttctcccatgcaattccagatctacaagcagacctgcttattgagtttattgaatttctacctttttttctgaaaatcagaatatctcagggtccataaatctgtgagaaactcgtgggaagcagagcagcacataacagcaagatgattttccccttccttttgtctttaggggtcaagaattcttgtctcatggttcaggcattgtgttaactatttctgtgcattctttaagcatagttgtaactgtagttttgattgaaatattaacctataagtgatttggaatatcaaaataaacattcatatcacagaagttttttttttttttgctcttgagagaatacgaagtaggttgatttttctgccattactatgatatatgtacattgcaaaacattatgctaactagctagcttaagaatatatgtacatataaaatgacagagtgacaaatttattagccaatttgctgtttgttataaggaagttgctgtctggaaaggcttcagaaccctgtccagctctacctccccttctgacttttcgtttcctgtgtctgggaacctcattgccttctctcatggtcatgttaagtaattattctcatgtgaggttactctgctaaccctcggcatttggctcacagcacagttattcccgcgtcagtgatgggggatggaaaccgtccatcactgcaagactgttcccatggctgaggagggagagatggtttcagtcctgttcttgttagtaacgtgttgagatgtaaatagattcatggctgatgatgttcccccatcaaagagttcatttagctcataggaagagtttgctatattctaaatttaacataaaataatgatgcaggaaagttttaggtttaagaaaataattttcacatgatacattgtgtatgcgtgtgtgtgcttgtgtgtgtgtgtaaatgttgctctggttccagcattctgatcaataaaagcagaagttcaggccattttatcctgaagtatttctatagggtagtcttatgagttgcttgattattatacaaagtatatacagttagtataaagagtgtgcaaactaaaatgaagggggctgaggaatcaagtgtgttgtcgctgaagttgattttgagactggagtggttaaataaaggctgttctaagaaattccatcaaaataaatttgatatactgccagaaattctacaactgccttctggatctaccacattctcttgggagttagaactactgctttctatagctacaattttattcttaactaggtctagtttttattggaaaaactgtcctaagattaaaagttaatagttgaaattaaatttaataataaaactgaatgtgtcattcagcattaatttttggtagccttatgtttcaatttgaacatcaaatattatgtaaaactgcatgctctgaagcatctatttaaatttggtacatttttgcagaagagcaacctggaaaaaaattaaataaataaatttggaaggtttgaagccttcaatgttctggggctcaggagcctaaaatcaaatgtgccctcagaaagacttaatattattttaggttgtgcacatttagaggtcgcttctcagaacttaaacacctctaagagttttattgacactctaacttttaaaacaacttccttggagactagtaccaagagaggaagcaagtcaaatcttgcatctcatacttgccctaaacatgagactcctgttattttagatcaaatttatactagaaggcaataaagatggcaactcattcaccacttgtttactcagtaatataaggtatttattctctagctgctcttcatttattcaataaagacattgggtaaatagcagcaaacaaaacagatagatatccttgcccttgtggattctggtagaagagcaagacaaaaagggaaataagtaagtaaatacatagtatgtaagataagtgctaagtagataagtacaatgggaaaagagagtggaaagaagagagatattgagtgggtgacctcaatacaaggtgacagttgagtaaaagaagggatgaaggagcaaacaatgccactatgtaaggtaagagcattccattagaggaaacatcaagtgcaaaggccctgtggcaggaatgtgcctggagggttaaaggaagagcaaggaggccatcgtggttgagtgggagagagagagtcgtggcaaatgagatcacaaggatatgagggtggagcaagagtaggggagaggtagagcacatagggcctgatagcatggtgactatatcatctattgtccaaacaggacaattttgagagtgaagggagacactattatgtcaggacaataggcataaaccaggactgtcctgggtaaacaaggaaaacctatacacctttaaaagtctttggcttttttctctgaatgagatgggaagtttttggaaagttatgtccagatgagtgacatgaacttgtttacattttaacaggaacattctggccaggcacagtggctcatgcttgtaatcccaacacctagggaggcagaggtgggaggatagcttgagcctaggcgttggctgctatgttgaaaagtatttcctaaatcaatgaagggaaaatatgcaatcttaaaatatgttatatatactaatatataacatgagaatattacctaaagtgtagcgtttactctatgccaagctaagtcgtatgaccctcccaacaaatctatgacatgctactgttgcctgaatgataatatgaaaaaagtgagtcccagactgttaagtaacttcctcaaagtcacacagctagaaatggcaggtccaggatttggatccagcctgatcccagaggctgtgctgttagccagcctgccgtactgttcttccacacacctcgtaagacaaaccttatcattaccaaaatgtcatccctaacacaaatagattttcaaagactgttcaaagaagaaaatcatttcctttatcttctccactaaatctaacagcttcattagttccttctttaagacagaagtaacacattgtaaagaaaatgtacaatagattgcactccaaaatagcatctatgttgtaagtcttgcagatggccttgggacatctggtgaacaggatttgtgtagcctatgttcattgtcatgtcagtgaggtcaactgacagaaggagagccagaaaataaaaaataaataaactgagaggaaagattgagttatttgatggactgattgcctcgacacctctgctcagagaaatgcattttgccaaacgaatggctcatctagttatcacttgaaaggctaggcaatttgtctgtggacaggatacagaagaatgaatgtctatggctagcccatagtttcagctgggttagaaacatcaggcttgactgataaagctagaggttgcttttctagacttttctccttgggggtttaccagatgcacaggagttaaaaggaggatgtggaagcataacagatgacatttgtggatatgtctaaactgatcattaaaaagatgccagcaatcctcaatttttaaagatttgcatataaaacgtaccttttgtgaaacctttccattaaatctaatgcataaggaacttcattattaattcctaattttaaaagcaacaaataaaggaaacattattgaacattttttcaatgtccaaaatattgcttatcaaaatatgaaaggtaatggatacacgtttcttaacaaaatattgaataacacattacactgcatcccacgtaagttttatgccacaaaagtaattctgcagaatgtctgtacaaaaaaaaatctctaactactgtgaacttttagtttgaaagaagatttaaatttcagttttcaccaaatagaaatatctagaatacagcaaagtttctcttttaaaatggtgtcattgatgtcataagtatgggtatttctctgcatattttcattgtttccacaaattttacttgcttaaagaagtgaaatctatgaaaattagggttatgttatatcatttaacagtcataatactttttaaacttttaaatatgttattgaaatgtagcatacacatagaataatgtgcctaagcattggctctgttaattttcacaaaatgaacacatgtgtaaccaggatcaacaaagagagcattatcagcaccctgaagtctcctagtcactatcctaacccctaagccactcactttcctgacttctaacagcatgaatttgcttgcctgtttttgtgtttctagcatatggaatcctatgatgcctgtaggtattgttttgtgtctggcttgtcttactcaacattatgtttgtgagagtcatccatattgttgcattcagttgtagttcagtcattctcattattgtatagcacttcactgtgtgaatatcgcactttctcaattctactaaagatgggcattattaagtagtttctagttttgggctattttgaatagtgcagctgtggacattctcctatgcatctttttggtgcatatatatgttgaatatgtaagtatatagatataaaaacctatagctgtgtacataatgatatctgtcatatttatgtatcaacatagatagctgcatactaagtatatctaaatatatacttcttatttaatttttcttgatcataaccttttatattttactattcagtaatgttggagaattacactaggttaaggtacagaattaagaactaggcaatagaattcttcttttttttttttttttttttttttttgtttagagatggggtcttgctttattgcccaggctggtttcaaactcctggcttcaagtaatcctctcatctcagcctcccaaattgctgggattacaggcatgagccaccatgcctggcccagaattcttttctaattctaaaagctttaagtcttgtgtggcctgtgtatgaatttggtccatgataattatttgcctttcaagaaaatctgttatctgccttcataatggataattcccagatcaactcacacattgactaagtacctgtagaaaacacagaggaatctaggctagccgtgccttcaagttgctgacgttctatttgaggatacaagcaaatagccaataaagttagcctggataccagcggagttttatactcaagtattttcttggactttttttttttgagatggagtctcgctctgtcgcccaggctggagtgcagtggcgcgatcttggctcactacaagctccgcctcccaggttcacaccattctcctgcctcagcctcccgagtagctgggactacaggtgcccgccaccaagcctggctaatttatttgtatttttagtagagacgaggtttcaccgtgttagccaggacggtctgcatctcctgacctcgtgatccgcccacctcggcctccaaagtgctgggattacaggcctgagccaccgcgcccagcctctctcggactttttgagaccaaagaacacaaagatactatttttaatgtgaaatacctctaaaaatgttcattgaaagtagaaagattggcatcttaatacaagattgccagggtagggatggttgtcatagaaatttaccaaattggaacacatgaagacagagctaaaagaaaaatttatcttaatatcatcagcaaaatttgcatttgcaacatcccaaaaagaaattttatttatgaaaacccactgaccacatatgaaatggaatcatcttacaatgtaaacactcccaggaagtcattcagaactctgtgaaatgtctgagcactgcatttttgcaatctcatgaataagagtttaaatgtgagtcattgacacttttcctgctttttgttctggggaaatagcttcacggtaatattttcattaattgtatggagtgacttcagaatcatctccagctcctgtaccatcataaaggaagtcaacccagagggagtggtatgcactaaggtgaccgtccagagcccactttcaagcactgctgcttgctcctgcttgattcgctcacccagggcccagcaaactacagctagtgagccaaatctggcccaccacctgtttttgtaaatgaagttttattggaacacagccatacctattgcttacgtattttctatggcagcttttgagtagtttcaacagacaccatatggcccagaaagcctaaaatatttactatctggccatttatggaaaaagtttgtcaagcctggtggcatctcaccaactgccctgccccttcctctcatccctggctctcatctacctccatttggacccacaggcagtcaaagcccaagatctgaacttcagaaatgtgaataaggcttcataacctttttctctttttaatagagatggggtttcactgtttcccaggcttatcttgaactcttaaactcaagcaattctcttacctcaaccttccaaaatactgggattacaggcatgagccactgcgaccagacacttcataacctttgatatttttaagtgcctaatgccttaaccccaagaagtaaatgggcataatctcaagaaatcaaaatatgttttattttttaaaatggtttgtcactgatcttgaataaatcacttgacctcccaagtcattctttttctttttcttcttttttcgagaaagggcctcactctaccacccagtctggagttcagcggcataaccacagctccctgctgccttaagctcctgagcccaagcaatcctcccacctaagcctcccaagtggctgggactacaggcacatgccaccatgcccatctaattttttgaatttttgtaaagatggggtctcattatgttgcccaggctggtctcaaatttttggactcaagtgatcctccttcctctgcttcacaaagtgctgggattgtaggtgtgagccaccatgcccagcctgaagtcattattttgtatttgaaaaaaataaataatgaagggaccatttcatggtatcccactaggcataatgacataaagtaggcttattcctaagctgacagccaaatcagttacaacaaccaagatctattgtctcttcgttgtctcgatttatgttagtaaacatcagaactttggtctcatgagaggtcttggcaaccacaattcacatgttttctaatcaaaattaaacaatttttaaactctttgtcacacacttagaaatattcaatacatcgtcctttgggtaattaaaagcagcactaagccaggtggctagatttttgggtagccatttatgtttcagttaagaaaaagaaaaaggaaaaggagatgatgaagatttttcatttattttagagaaatttcatatgaaaatatagttactctctaaaagtctttttttttttttttttttttttttgagacggagtctcactctgtcatccaggctggagtgcagtaatgcaatcttggcttgctgcaaactccgcctcccgagttcaagcgattctcctacctcagcctcctgagtagcagggattacaggtgcccaccaccacacccagctaatctttgtatttttagtagagatggggtttcaccgtgttggccaggctgatctcgaactcctgatctcaggtggtctgcccgcctcagcctcccaaagtgctgggattacgagtgtgagccaccacacctagcctctaaaagtcttaaagataaagctttacatacttgaagttactcagtcagaaaatcacaacactttatatttctttggaaggaccaattgaattacaagatcataactaaaaacagatgaattttcttacctctatgctgtaaaaatcagggactatttctttaataatggacagaaaggccatgtcttagacaaaggggaaagtgggggataagataagaaatatctcatgttccattttttaacattaggtgtatgtgtgtatgcatacatgttattttttgtgacacagatgttctctgtttacattagatttttccaaactgttagcagtcaggtgcggtgattcacacctgtaatcccagcacattgggaggccaaggccagaggctcatttgagcccataagttcgagactagccagagtaacatgatgaaaccccattgctacaaaaaatacaaaaattggctgagtgtggtggcacatgcctgcagtcccagctactggaaggctgaagtgggagaatcacttgagcccaggtcgaggcttctgagccatgattgctcccactgcactccagcttggaaggaaaaaaaaatgttgggaggaaaggacaggggagctacaggggatggaggtaaaaaaaaaaaaaaagcagagttgggtagtggagacccatccttagggctcaaccatgtcattctgccagcacccaggtgacatttcatatatttgaggaagaaagggagggagcatggactctcaaaatgtgaggagtcaaaatatgtagttccaactatgtgaaagcagcttgaagaaccagagcattgacctattcgtgatttttgcagaggcactcatttggattggccctccaaacaggctggtgtaagagcctctcagtatctacaccaaagcccatctctcttgtggttttgaaattctttacttgtttgcagtagctccagtgaaccctcatgaagtgataaacatttagtttatttgtggaaatggcccagaagaaaaagctggtattagaaccgaagatgtctaatgaagtatatttttcttagccagaaattttggataaatgaatgagtggagaaaagtaagtgcctgagggctcaatatttgtccttcaattactttttaggttgtgattcttggtacatgccatattctgttcagactacctcttctctactaaaaacatgcctgtgcaggggcagttcccacactagtaggaggtacagtctcacacatttatgcctttgtataaattagagaaaatcctaatgtttcatgttttgaatagggaatatattcaaatggatcaaaaatcaagaaagtagaaaaaggtacacattgagaagtcttcctcttagaccagtcctgatcaccaaatttccccactcccaccctctatagcgaatcacctttaaaagattcttctgtatctttccagtgtttcttcatgcaaatataagaaaatccaaatatatatttctgttctctcccctgtttattatacaatgttctgtacattgcttttttcaattgacagtacatcctggagatctctgaatatcaatatatgaaaagctgcctcattttttaaatagtttcatagtatcccattgtgggagagtgccataggttatataatcaattgttccaatcttttgtttttgcagactatgctacaattgtaaccatatgcatgtcatgtttatatctgtgggtacacctatatgacaaattcccacacataggattcctgtgccataggtcaagtgtctgtattactttgatataaattgccaaattgtcctccataataattgtgctgtcttgcactctcattagcaacgtaggagttcctatttccccattgcctaaacatatttttagattaggcatttctctttcctttggattatcttaaatagaaaatgtcagggaggaagtctttttttgttcctatatgctaagattgcctataaaaaaatggtgaaaaaataggaaactaattttggaaacgtattgggtcactgaatcaaatgcccagtgataatttaatgtgtcatttactcttgcaaaagtatacatttttacccataatgaagaggacactaattcaagaaagtatcatagaaaattagatattttttctactctgaagcaatcactgattgtcagtggattctatacactaaattatttcagaattcatacacctgaaaattgtcaaatatataaactctaattattaaattattgatatttagaagaaggatttgtgaagcatttgtgccagtttttccctgtcatttatatatcaaaaaagtactcataatggaaccaaattatttccatcttcaacttgaacagctttttgatatttcaggttgaaaccaagataagcctgtgcattgagtctgaagaattgtactttttccaaatattacagttttgaaaactaatttatgaattgaagtagctaagttccatccagtttccaactcccattttttgacacagatcagaatgaaaaacctagaagccaatatccaaactttactccagacctttccactgttcaggcagtagttgaggactgagacagacgttctgaatgacaactttacggtgacaactgactgttaatgtcatgtgataacatgtctgtagcttttttggaaataatctaggatgatagaatgggaggtatctcttcaaaaatatgtatttagcctaattgctgaaatactttatatttttaggactgatatgactgctttttttcatttatttagtttataacttcatgtagtatgaattcagcctgaaattgacatttaaattttgtacctaaattcgtaggtttagtttttttaagaaaacaatggctttccagtaaataaaataatatttttacattttcttttgttcagccttgagtttgttttgagagctttagtttggataaaaaagagaaatgtcattttaaaatttgggagaattgtaaaacaccattatattttttcagatacgttttaaaatttattttgtacaaaatatttatagatatgaggcttcactttgttgaattcatcatacacacacacttctttttagcagaaattaatagaaagccaattctaaattaatgtaggtaatacataatctactcaactggatgaataccttggttgcaagtcttgtcctgagcgagctaagtgacaacactctcaatctactgagcttccagcatctaggcagagctcccaggacaagcagaagtcacagggaacaggaagcaggaaagagcaggaaaagatcctttagttcccatgtgtagaaacaaatgctcagctgcctctgtattgaaccatactgatgcctgccactatattgttcattgtagatagaaatcattataagttgcagtcgattagaaattgcaaccacctctttcaaaaaagtgattaccaaaattttgaaaggaagagaaatacagattgtaattttttgctataccagcaaagaaaattaaatattaaaaatattataaagatgcttctgacaagctatgtgaccttcagagtttcgtcgtcaaaacacagtattaatctagatcagcgtttctccaaatttttgttctcagcacccctttatactcggaaaaatcattgaggacaccaaatttttcttcatgtatgttatattgatggatatttatgatgttacaagttaaaactgatcattttataaaaaatatttattaattttcatgaacataaccccattaaatgttaacataaatgatatatttttatgaaaaaaattatattttccaaaacaaaaaaattatttagtgcgaaaaaatggcattgttttacatttttacaaatctgtttatttaacgtctggcttaatagaagacagctaaaactcatatcagcttctgcaatctgttgtactatgttgttttggttgaagcatatgaaaaaactctagcctcacaaaaaaaaatgtcgtttaaaaaaggatgaggattttcatcgtcttttcagataattgcgaatattctttgatacgacatcaaaactctcccattggcagttctgtaaagattagttgcaatgtgtaaagtgaaaccatattaatgaacttttcagacactactacattaaaatatgttgtctctcttgtactttgcatagatcgtttacataagcatggttttgcaacatcagatattggccgttacgaattactagtttaccaattataaggatcttctcaatgttgccttatttaattacataatatcaaaaaactacattcgttaatatcaccaccaatcctttgtcacgtggaatattaaaaagacatgtacctaagctcaagatatattaaaaatttgtaatttctctgctgcttcaacagggatatcttaagggaaactcatgaaacatgatccataaggaaaaaaaattggaccttatcaaaatcaaaaacttttactctgcaaaagaccctgttaagaggatgaaaagacaacagccgggtgcggtggttcacgcctgtaatcccagcactttgggaggccaaggcaggcagattactttgagctcaggagttaaggaccagcctgggcaacatggcaaatctccatctctacaaaaaaaaatacaaaagttagccaggcatggtggcatgcacctgtggtcccagctactctggaggctgaggctgtagaatcacttaaacctgggaggcagaggttgcagtgagccgagattgcaccactgcataccagcctgggcaacaaagtgggaccctgtctcaaaaaaaaaaaaaaaaaaaaggattcatatctagaatatacagagaattctcaaaactcaatggtaaaaaaaatgaataatccaaatagaaaatggacaaaagacatgtacagaaattttactgaagggtatatgcagatgacagataggcacatgaaaagatgttcaatatcattagccattagggaaatgcaagtcaaaccgcagtgagatatcactacaccctatctgaatggctaaaatgtaaaaaaaaaaaaaagagagagagagagagagacaacatctaattctgtcatggatgaagagaaactgctggtggaaacggaatgtagagccactctgtaagagagtttggcagtttcttttttcattttttttttttttttttttttttttttggaggtggagttgcgctcttgttgcccaggctggagtgcaatggcatgatctaagctcactgcaacctccgcctcccaggttcaagcaagtctctcctgcctcagcctcctgagtaactaggattgcaggtgtgcaacaccatgcccagctaatttttgtatttttagtagagacggggtttcaccatgttggttaggctggtctcgaaccccaggcctcaggcgatccacccacctcagcctcccatagtgctgtgattacaggcgtaagccaccctgccccgccggcagtttttttttttttttttttttagacagagtctcagtctgttgcccagactggagtgcagtggcgccatctcggctcactgcaagctccgcctcctgggttcacgtcattctcctgcctcagcctcccgagtagctgggaccacaggtgcccgccaccatgcccagctaattttttgcattcttagtagagacggggtttcaccgtgtcagccaggatggtctcaatctcctgaccaggagatccgcccgccttggcctcccaaagtgctaggattacaggcgtgagtgaccgcgcccggccggcagtttcttataaaactaaatatgcaattaccataagacccagcagttgcactcttgagcatgtatcccagagaagtgaaaattttgttcatgcaaaaacctgtacattgctctttccctgggttcccagtatcctggcaggttcctgaatatttgtcacagcaatgagctaaagcccctggaagaggtgaagttgggaaactgtggattgccaagactcaaggaaggactgaggtgtcatttactttgaatgaagatcttgcaaatattcatgatattggccgaaaagcagcttcagtcagtgctcataaagaacatccatttgtcttgcaaaatattggaggccatatatgaacaatatttactgagagctcatcagataagctgtcttcggaaggaatagtggtacaaagaactgaatgccaacagactgccagtgaaaagtacatgagattaaaaagattgcaaatagaggaatcttccaaacctgtaaggctatcacaacaactggacaaagttgtaacagccagttttgaacctgttgctaatcaatacaatactgaatgtgaaaggaaagagaaaacagatggaaaataagctccagctaataaacaacacgtttcagacatgctattttcagcctttagaaatatcaatattatcatcttaaggacttggtggacatcacaaaacaacctgtggtatacctgagggaactcttaaattggtcttcagaatgtaaaagagatccacaaaaacacgtgggagctgaaaccagagtacagacatcaccaaggagaagaaatgagtgattaagatggctcctagccagcatgttagtgaaacaacagtgatgctaagcaaaacgcattgatactggaaggcttgaacaccgtatgttaatgggggctaagtggcaatactttcctttctctcggtaaattttctaaacctataactgttgtaaagtttcttcagtgttttttgaggagaaagaacaaatttatttatagacttaacttgtattaaaccaggctattcacaatgggaataagggttggaggattaagaggatttctcttaaatattagcttttagcatgtaaaattaggaaatggtttttaaatgaggactctctgcccttgctgtatctctgaggagctgaggtagtacagaatcaaagagaataatatagcaagaaaaaaacagtcaactacagaaattcttaaaaggaataaaaagccaaagttccttattttgaggggggaaaaaaaaaaaccctgtacattaacactcacagtagtttcacctgtaatagccaaaccctgaagacaactcagatgttcttcaatgtgagtggtcaaaccaaccatggtacatccataccagagactactactcagcatgaaaggaaacaagtcactgttacacacaaccatctgggtgaatctccggagaaccgtgctaagtgaaaaaaagtcaatctcaaaagattgcatactatattactccatttatataacattcttgaaatgatagagttatagagatggataacagattaatggttgccaggggttgggaatgggaaggggagagaagggaaatatgggtagaagaggacatcaaaagggatccttgcggtgataaacctgttctgtatcttgactggtgataaatacacaaacctacacatgttactcaattgcatagagctaaatgcacacaaattagtatatgtgaaactggggaaataaaataatattggtagattatatcaacatcaaaaaaattgtgccatttcacattcccaccagctttatatgaaggttttaatttctccacatcctcaccccaacacttattattgtcagtctttttcattacagccattctaatagtgtatagtggtatcccgtggtggttttaactagcatttccttaatggctaaggatgttgagcattttctatgtccttacctacttatgtatctgctttggtgaaatgttcacttaaatctttgcacatttttaattaagtatttattttattttagttataggagttctttatagattctagacagaagtccttcatcagatgtatgatttgcaaatatttttcccagttagcggatttgtttttattttcttcatgtcttttgaagagcaaaaattctttattttatttatttatttttttgtttgaaatggagtctcgctctgtcacccaggctgaagtgcagtggggcaatctccactcactgcaacctccacctcccgggttcaagcgattctcatgcctcagcttccagagtagctgggattacgggcatgcaccaccacgcctggctaatttttgtatttttagtagaaacggggtttcgccatgttgtccaggctggtctcaaacccctgacctcaggtgatccacccacttcggcctcccaaagctctgggattacaggcatgagccaccatgcccagcctgaagagcaaaaattcttattttgatcaaatccggtttatcaaatttttcttctatggatcatgccctagtgtcctatctgtgaaatttttgcctaacccaagatcacaaagaatttctcctatgttttctttgaacagttttagaggcttagctcttacattcagttctgtaatcttttctggctaaatttttgtgtatgatatgaggcaggcatctaagttatttttttgcatatggatactcagtttttcaacaccattctttgaagactattctcattgaattgccttggacctttattaaaactcaattgacaataaatataagagcttgtatctggactttctttctggtccagtgacctgtgttctattgttatgccaataccatcctgtcttaattactggagctttatattaatagtaagtttttaaataagtactataagttctcctactttgcattttgtcagaattgttttggctattctagatcccttatatttttatgtaaattttaagatgaatttgttagtttccttggatttggataggaattgcattgaccctttaggtgaatttggggagaattgccatcttaataatatcaattcttcttttgttatatgtattctcaactattttattcttttttggtacagttttgaatggaatttttctttaatttttttagatttttcatggctagtatgcagaaatgcagttgttttctgcatattgatcttggatcctatgactttgttcaagttctattccttttgcagcatcagctttcttcctgcgaatgtgtgatggtgaagagtacaatgacctttaggtagtttggtgccacggtcgtgattcatgcgaaagcaccagcagtttacctaccattgcttttgtactaacagtgcaaatgtcaaccagtgaaaaaaggcagtaatctctgagtgttattttgattttgcagacctcaaggaaggttcccagggttccccagtggtctgcatacaacactgagagaaccagtgatctagatcaggggtcctcaacccccaggctgcagactagtaccagttcatggcctgttaggaatcagccacacagcaggaggtgagtggcaggcaagcagtgaagcttcctctgtatttacagctgctccccatcactcgcattacctcatgagctttgcctcctgtcagatcagcagcagcatcagattctcaaaggagtatgaacccttttgtgaactgcacacacaagggatctagattgtgcattccttatgagaatctaacgcctaatgatctgtcactgtctcccattaaccctagatgggaccatctagttgcaggaaaacaagctgagggctcccactgattttacattatggtgagttgtataattattttattatatattgcaatgtaatcataatagaaataaagtgcacaataaatgtaatatgcttgagtcatcccaaaaccatcctgcccccgctgccaggtccatgtaaaaattgtcttccacaaaacgagtccctggtaccaaaaaggttggggaccgctgatctagatggtctctaagctcccatccaagtgtaaaatgctataatttttaaaacctaagatgaacagtgttgatcagatttgactttacaacatttacttaaatggctggttttcttggcagtcaatatttcttaggcaattgctgcatgtggaacaatgtatctagtcctttgagagagatggaaaggaaatagaacactggtcctaatctcaagaaaatggcaaaagaaggctctctgggtttgcaggtgtctaggaaaggaacccagtgtcactgtaggctgattgtattagacctcaaatttgtatattttttgttctactaaaaataaacaaaatgcttatagtagagatacaacatatatcaaacttcaagactagaagtaaaactaggttaaaatctatcattctaggctagtacaacctaatgttatctcatttccaaatgaccataagacataaagtaacatcaaactaatttttacaactttttcaagtagctttaattttacattattgtttataacagacccgtggttggaagcttaaaatctccacttaactgatattttttctacattttatatgtaattcaaattatgtatacaatatgatgcttacagctcactgggcaaatttactatacattttagcttttcctttgagagtaatgaaatagtgttcatatattcaaggcaaataaatagtctcaaggcttcaatatgtgggattctccaagttctgacatccttaatctttttaggtagaaaaaaagggactgaagcactctttcacgggaagaatgaaaagaaattgagaaagcaaaattaatcatatacagtacagggaagggtgcaggttagcttagagataaatggagttaataatagtttcagataaactagttacagactagagttctgatatgaaaataatgtacaatttcagagctggtagagaattcagagagtatctagttctagcctaacatttcttgtttggcagaggagggagctaaatcttctagatttttgacagagctagactggaagccagcatttctaacttctcctttagtatgttccatccttccatctctgcattcaatagaacttttgtggttttaatactctcgacaccacaaattgcatttccctagaagacagcctggcttctaaaactttatagtgaattattaaaatgtatgccattcttatctgaagtttcataatatgattagtaagccagccatcctgactttgtcttctattttgcttaatgcctcaattatgagtaattgtgaagttttattttctaatgaatttctgttgttaaatattcaaaatcacctcaatcttatttactatcaagtcagtgagagcatcaactttattctactttattctttttttcccgaaacacacatatggtattattttgctcatgctgcataccatatcttttttggctcattttttccatctacactcaggataattgtgaccacatgacacattttacaataaagaacttaagtttcttcagaacttatacattagatcattaaatcagctgcatactttcaaatatgccatttgttttccctttttcctattcatcatcacctacatcactgataagattttgggatccactacctaaatctgtatgtggggatctctgctattctgttttatcttgttttgttctgctttggttttgcctgcctgtttcttttaaataggcactagcatgtctgaccatagagactgatgattaaaatcaactataaaacttttccattaggttttgggacttattgtctgtccgggtcaaagcaccccatttctatgatgggagctctgacccagacacacaataaggcccaaaactgtgcttgtatgtttttatgacaagatgtagggctccactcacaacacatggaaaatcttttctccattccatgaaaaccagggtctttctttctagcatgaatctcctctccattatgaattaaaccttaaagtattgacacacacaatcagcacaaaccttgcaatttcaatattgaggctctctaatttttcttctctaaagttccattcttctctatccaatgatcctttggtcatatgcttacaaaataagtaaaagcctcaagtccctcacttttggattggtactcttacagcaaagagagttattaaaaagagatattcctcttgattcccaggcttcaggtgactgagattctcaggggtgataagcccatatcttgggtgaataatctatcctcaaaggaaaaaatcttcatggctctggaactctggctttaaaaagttctctttctccttgtttcctctcatccaccttgttgttattaacatctatgtatttcagattctaaaaagtgaagacctcaacagagactgaaacaccgaatattcagtagtgaaagatgtggttagtgagtagcaacaattccatctctttccatctaaatgcagtttagcaagaagcagttcctcagaatccatctcctacgggaactaacatttatgatttgctatagatcaggccctgctgtaagtgcttttcatgtatgaacccatttaatacatcaaccatatgcatgggcactctctttatctgcagttttccatgaggaacagttaacatgtctaagtcacgccaggggacaaagtcacccgagcctgttctctttactgttaggtcacaccaccctcttcttctgtggagctcccagggaagattgcttagagcttcttgagaagctgttatttctgcttatcttctggtggggtcttttgttcttgtgtggcctgccaccaccctgcacctggtgacctggaccatgggtgaccataaccatgaaccatcaatagttatggctcacacttccatattctgacttctgccaagcccttcctctggattctctcttcgctggcccacagtaatcctctgtggtagctaccagaacgatcttcattttatagaagagaaaactaacaggcacaaaggttaacgagcatgccaatgtcaaaagatcaggaagacagcagagcttggggtcagtctgcccccaaggaatccagcttcagggcccacgctctgagctactatgccaagccagctgccttgattacaaggagggcttctccatccccccagctcagggagggcacctaaggccagagtcaaaaccatttatggaatttctgctctactctgcatttgtcatacatcctgaattcttggactggtcaggaggcaagaaaagcctgttcaaaggaaaaagtgtatggataggggatagggagaggccatagcttttatgacatttgtatgaatgctctgtctcaatcctgaagcaattaatgcataacagaagaacaaaatctattcttggtcacacacagtgacttatttcgtagtatctgcagtggccagagagcacgttctcataaatggcctgtcctgggcatcacaatctttataatcatctcagtctgtgctgttggaagatgtttttgtttgctactgagtcaactatgtaccaacttttacatcccagtcccttccccagaaagaaagaaaaacctcagaacctcagtttttaaagcctgatacctggtcagtcatgtccaattctaagcgaccctataataattcatattgaagggaagagaaggttttccttgctttgaggtttgcagctattacagactgtatttgtaaatccctcattcctgtctaggacaaacaggagatgaaggagaggagaagaacccttcggcctcacaggatggggtgagaggaaaatcagcacaaagaaaaatatgccactagttttatttgtaccattttaagatgccatgacaacaacaaaaataatgtacaagtaataggattaagtagcaggggatattaacatctggaatggataaagaggcataagttcgtttatattttcatggttgtgcataaatggtacgtttcagtttacgattacaaattatagcaattcaaaataacgtttgtgtgttatatgttcagtttgcagaattctttcatatgcattaacccatttgagcaccccaaatgagcatcatatccttgtggcaggtatgagaactacccccatttaacaaatacagaaacacagacttacaacggggaactggcttacccaaggtcacacagttagcaacaggtcaatctcgtacttgaacctaaatcttataggttcacaacccatcctgaatataggggagaacagccttattttgtagtgctaagctggtgaggcctggggcagtagaacatctgttattgtactgtgactttatgtgctgatgtctttagggactattgtctttgggtgagagtgtaaggggatgcaggctacatggccccaacacgattttttctttttctttttcttttttgtttttttgagacggagtttcactctcgttgcccaggctggaatacaatggcatgatctcggctcactgcaaactttgcctcccaggttcaagtgattctcctgcctcagcctcccaagtagctgggattataggcgcgtgccaccacacctggctaattcttgtctttttagtagagacagggtttcaccacgttggccaggctggtctcgaactcctggcctcaagtgatcaatccacctcaccctcccaaagtgcagggattacaggtgtgagccactgcacccagcccaagattttttatttcttgtgactatattttatacctttttctgctcctcctgttccatttgactgtcagctgtcatttttgctgaccatggcacctctagagcagtgatcctcaaagtatggttggtgagccagcagcatcagcatcacctgagaacttgctagaaatgcaaattctcaggccctgccccagacctactgaatcaggaactctggggatggggcccagccatctgtgtttcaatgagccctccaggtgattctgcagctgctaagtcttgggagctgctgctccacagcaactattcacaaccttggctgtccttgggaatcccctgggacccttaaagactactaatgcttatgtcccaactccaaagattctaattttgttggtctaggacacagttttttaacctcagcaccagtgatatttgggtggggggatgattatttgttggggttgtctgtcctgtacattgcaaaatgtttagcagcatcccaagcctctacccctagatgcgagtagcacacccacccccagctgtaataactaaaaatatctcagacattgccaagtgttccctgtggtggtggggggaagggggatggcaaaattgtcccctggttgataagcactggcctagggtgatggccaaggcactgggatatggaagagctcccaaaatcattctaatatacaggcaacactgagaactatgcctctggagagtctctattaatgaacagctctggatgtgcaatgggccagagcacaataagagctaagctttacaccactgggtgtagagtgagaatcagtccccctgtggtggagactcaggcagtttgctgaggactaacacacatgagctttagggcataaatttcacaactttttggctccttacatttttgtttactttctggttgtcaggtatgttctagaaaactaatgtaaacagatatgttccccatacttaagaggtcccaaccaatgagatcttgcattgcactaaatatagtggtgaatgtacatcctccatctggctctatccattctacaaacagggtgcatatcagtgtatcatatggtacaagttcttccctaaatctgtttttaatgggttaaaacatgcagcttgtcaattctatgatgttgattttgatacaatccaaatcaaccacacaaatgcaaaattcctatattaatctctgctgtttagaagagctttcattttcaggtggggatcaggggctttaactatatttcaactatagaaaaattccctgagttagaacaaagacatgtaaaatcctggcccagcagattgccttctgtgtctccacgattctttctgtggtgttcttctgtgatctgcttgagaagaggagaacatgatgtacatttagaccatgggatgtgcctcacctccaagggcctgccctgcagctcttaggaaggtgggcagtctcatcacagcccaaagtgagatgtctccaagcaaagagtaaatggcagcctctcttcagcctagactcttaaatagcacagtattctcccacttcctcaaacaactcgatggtaggtttctttcaacataaagagtgggagcactactttgagacactgataaacaactttcaaatagaaaataaatttcaaagtgaatgtgttttcagggcaaaattggtactgtctcatttcaaactatgaaaatatgatctgatttaatgagttggagtcatccattcatccagcacctactatgtgctaggtactgtgtaatgtccttggaaattataaatatgagggtggcaaattataaatattagggtacatagactcttgtagcaaaaataagctatgactgatctgaggtgcctgattaaccctttgaaccaatacgactcgtcagcttgtcagactcttttgggttttgttttgtcttgttttgttttgtttttttcattgaattgacagttgcttgttaacattagtgaaatcagtgagttctttgccatggtctaggatgtattctcttaaacagttacttatttattcctctcctagtctatttcattaacatgcttttaaaaatcaaaactttttgattaagcaatagaattgctctccagaaaattactccaggaaaaaaagatcataatggagtactaaaagatattatttccatatgttcccacttgttttctttttgtaaaaaaaaaaagcatatgcttctatgtacataggatgttttctggaagaaaacacacttagcaattaacagtggttgcctttgggcagggagtttgggggccttgactggaagggagacttaactttgcattatataagcttttatacagcttaatttttaccatcttatgtattatatttttaattttaagtgctagtaaataacaggatgcattcccagtagtccttcagaagctccaagtgcttctgctaaataagagaaaaccagtgagccccactgtttgcctccatgaggactcctgctcctgctcttgctccagcagagcaagctgaaaggacactttgaatgtaggactgctccaacactggttccatggaagagattaacaagcgggttctacttgaggttagatagttaatgagggcctctttgaggaagccacatggaaccagagaggaaaaggaaaagagggggacgttgcctacaggcagggacctaatttcctcctagcagcattggacacttactacccatacatcctttcagaatgaaggacatacaagttagggaagtctacacagtgattacacctaataattttctccaatgatttctttccttcccctttatctataattcccaagaagaatcaatgctcactcctaggaaaaggaaaaagaacaccaccaccaacaccacacctatttgtctcaaagaaagacaattccatgatcttttttgcttcccactgattccatgatgtctttcctctctgtccttctttatgcctaaccctaacctaatcctagttaaaagtttaaggaagcatgtaaaaggaaaaaatgtaattgagattggaagaatctgagagaatccatgttcatttgtggtttttctggatcattttcttagcacttgccactgagaccttcacaggatttcagagtctcccttattaagcaagaacatctttttcttttctttcattgttagatgtgtgaattgggaaatccattcatgtggattatcagggtcctcttaatctccgggaatgaacaaacaaacaattcaactgttccagagtatatcccataaccgtgcctacactgttttaattacatatatctgtggtctttgaagaattataattctgagccagaattctaaattcttattctataaaaagtagttttcaggttttcttgtttttatagggtgattcatctcagaaatagtgttttatgtctttacttgcaccaagcattaataaccagcagtcagcaatggcataattatttgtcagcttcatgaaaaccataagaaatgaaggcagtgtttgtgcaaagagttttgtggttgtccttggacaaaagtttatgaggaaattttgagaagacaccaatcgagactgtttatagtgagatgaagaagaaaccagaggcactattggattaaagaaaaaggttattttcaaaaactatttagaagaaaggaagtaatcacgaaaactaaagagagaaaacctctataatgaagttttatagggtcttagccaaaaatcacagagtgagagactgccctgtgtaaccaagttctcattctttatctacggggtactggtttcccaaactctttcaaaggactcgtgttatggatcacactgaccatggaattaaacctcacatcatcttttggaaatagtagaaaagaaattcaaagcttagcttagagttactatggcaaaaagaacttttcaaaaaaaaaagaaaaaggagtttgtcaagttagtaggatactgtttcctagtgagttaagtttaaattgagtcactaagcaaaaaattagaaaggaaatcaataccattttcacacttgaaaaggcatcatatgttcagcaggaacttccttcccccttttaggtagctgagctattatttaagcccatgctcctagtataatacctaattagacaaatacagagtactggtagctattgttatgtgtctgctacccagcacagccactagagggtgtccactcttgccttgcaaacaaggttggaaattgtcaacatggaagaacagatttttctgcatgtgataccaacagatcaaggtaaccacatttttctgtatagtaaggggaagtttgagcctaaatagagaaaagccacttacatcacatctactgaagcagagtcagccccttaagcacagaggaaaatgtaagttcaaagtggctttaggtgttagctagctgccaaaattagtagcttctacaccactttgtttttttccagtattctccctaacctttcattcttaatttcagagacaatataatctgccaattccagtagttgaaattatttgctttactcatggtttagtaagcacagataaaaaaccactgtcggcttctcagttgagctgtctcccaaaatcccaaacttttactactgtttgaaaagtaggcagcgtgactagttgatgtgagatcaaaggcacatctcttctgttattaaattgtattatataactataatatatttaatatatatgtattatattaatacactatattgatttttatgtattaaatatatatcacaatatattcatgttactacatattaataataataaattatatctgtatatctttccagactaaaaattgctgaggctttaaaatacgaaagaaaaaaataacaattctaatactcttttgctacagtgctaactgaaaagcactgtgaataaaatttagaagttgggacgcataactaaaactgtaagtgcccacatgctccgtgccagctctaccatttcttaccactgtgtctccttctttcagctgctggctgggcgctggccttttgatcacaatgactttggcgtatttctttgcaagctgttcccctttttgcagaagtcctcggtggggatcaccgtcctcaacctctgcgctcttagtgttgacaggtaatgtggttctttccctttgctctttggctgggcttagaaaagcatttttctcaaaaagaagaaaagtcaagagaattcgtgcccaggacagctgttgattagcttcaagtgaattaaagcattaaccatcttgcctttgctgtttagaattgccttccacatttgctgattattagccatctttggctcagacaattatgtacctagagcattttatcaagaatacccatttgacgcccttttggcaataaagtgaaaattaacatattagatggaataaactttgtgaaaaggagattccaggatatgcaaatcctatatttcacctggtaaatttatcataaaaaaagatactgttcaattatatctgtaatgtttaattaattgagtgagaggtaagtgcaccatattgctatgttcttcaccctgcctttttgaaagactgaaatgtttcataagttttaaaaagagtgcaacaccagaagcatccctttatccaattctgaaaactccatcaaatgtcccgaagtctttccagaatccgcacgcatgattgttaagcgttctctaaagaagcccttctgaattctgtgaacttctagatggtattttctttaccttctggttttcatagcagcaattataagaatgaaattaggaactttataacacattctgtggcactcttttatatttactataatctcacacaagtggtgtataatggcctatttaattagcctacatacaatttagaagaggttttcattctaactcattccctgacaatcactttatcagggaacctgagtctcatcattatagaaataaaaggctcactcttctaaagaacattaaagagtttacagatattctgttattttacatttataattattgttaggacaaaaattgttactgttaaaacataaaaatgtgcattcaatcagcaattagaaaattagaatggtatccttgttataaatttatgtcagctgggcacggtggctcacacctgtaatcctagcactttaggaggccaagatgggctgacttcttgagcccaggagtttgaaactagtctgagtaacataggaaaaccccatctctaccaaaaatacaaaaaattagctggacatggtgatgcatgcctgtagtcccagctattcaggaggctaaggtgggagaatcacctgagcccaggaataaataaataaataaatggctataactgtgaaacacaaaataaaaatgttattaaaaataaaacacaaaaaataatttcattagtaatttaaaacacaatcataccattgacaaaaatgttcccattgcaatggtaaacacaaagatcagaaataaccttatcatctattaataatacccttcagtgatttgtaggaaagtctagggtctctttgggttacatctacattatattagatgttaaaggctgctgcataaaaacacttacataccataggtggccactatataatcttgagatcatggtaccttagaccataaaaagctgaataaacacttatgatgtggatttgattcactaataaattctcactctgatgttcccactcccagcatcccaatatcatttcttctttcattcaaaatgttatattatctaaaaattaaaagcattaaattgcacctattacattgctaatacaagtaaaatttttcctgtattcatcaagctgcatatcatcaagttacatttctttcagagatgtaaccatgtattttcattataatatctaattaaattttttagttataactctaaaattcatgtagagaaaagaaatgggaaaataatcatgacattttgaaaaaagaacaatgtgtcctacacacatgttcttcctatatgatttttctttttattaaaatacagggtcttgctctgtcacccggactagaatgcagtggcctatatggtcattttaaatgctataaagctacaatgttttaaacaatgtaatgcaaacccatgaacacactgacaaatcagtgggaaaactcgactcaggtgctggaatacacaagaatgtattaataatataggctgaaatcactttgaatataatcgggggaggaaagatttatcaataaattatgctatttagccatctgagggaaaaagcatgttaaagtcttctgtacatatcaataataatatttataattattaccatttattgaatattactaagtgttaggccctattgaaaatactttacaaaaattagtttagggctgggtgaggtggctcatgcctgtaatcccagcactttgtgaggccaaggtgggcagatcacttgaagccaggagttcaagaccaggctgcccaacaggtgaaaccccatctctacaaataatacaaaaattagccaggcatgctggtaggcatctatagtcccagctgcttgggaggctaaggcacaagaatcgcttgaacccgggaggtggaagttgcagtgagccgagattagacaacagcagctgcactccaggctgggggatggagtgagactctgtctcaaaaaaaaaaaaaaattagtttatgtaactgtgatagttggtgtgttatctccactttacagatagggaagctgaggttgaaagagattaaccaagtcagcatggctactaagtgctggagccactaatcaaatgttggtagtctgcattcttaaccactatactcaagcatgtaaaaactcaaaccattgttgatgaagaaagccaaactctgaataatagttgaagagatgtattctgaaccaaatgtgaagaccatgacccgtgacacagcctcaggaggtcccgagaacctgtgcccaaggttgttgagttacagtttaattttatacattttagggagacagaagttacaggcaaaaacataaatccatacacgtaaggtttacagtggtttggcctggaaacatgggacatcttgaagtggaggttgggtgaggagggcagggtggtgcttccacgtcacaggtggattcaaagatttcctgactggcatttagttgaaagagttaagttttgtctaaagatttgaagtcagcaaatgctgacaagaagtgcttggggttaggataagggggttgtggaagccaaggttctatgtagatgaagcctccaggtagtatgagaatagatagtaaatgcctcttatcagatcttaaaaggtgccagactcttagttaaatctctcctggatcaggaaaagacctggaaatggaagggaataatctacagaatgtaaattttctccacaagagatgcctatacagggccatttcaaaataggtcaaagaaatatattttggagtgaaatacttctatttctttcagggccttctctctgtcacgtgatgctatactagagtgtgcttgggatttggtatgtcactgctacagagagtctgttttgttgggtgtttgtttttttttgttgttgttgtttttttgttttttttgtttttttttttgagatggagtcttgctctgtggcccaggctagagtgcagtggcttgatctcggctcactgcaagctccgcctcccaggttcacgccattctcctgcctcagcttcccgagtagctgggactacaggtgcccaccaccacgcccggcttattttttgtatttttagtagagacggggtttcaccgtgttagccaggatggtttcgatctcctgatctcgtgatccacccgcctcagcctcccaaagtgctgggattacaggcatgagccaccgcgcccgtcctgttttgttagtcttaagatctgttctaacgttaatgctggcctgttgtgcctaaattccaaagagaggaaagtatgaagaggcaggtctgacatccccttcccatcatggcctgaactcgtattttaggtttctttgaaatccccttggccaagaggaggagtccattcagtcatttgaggggcttagaattttatttttgtttataccataaaggagtagaagaaaatagactatctttttgatctctggaaagggaaggaagacccttctgaactttaaaagaatggtagaaatgctggacaaaattataaatgtattttaagatatagtattttaaaacctttggattaaacattcataaaacttaaaaaaaaaaaaagtagtaagctaggaaaaattgtcactcctcccacaggcccagggtgcagagctggttcctcctcacttttttgttctgcctcctctttcttccttggggggatctaggagcatcatgcggagcttcagtcatgcccagtgttgagtcggggagatactgggaaagttaggtcatagattcctatatctagtgtcgggtcacctcacccaataccacctcctctcttcatctcatgcatgaagaaaaagaaataagatgttccatcacgataaatagttgtgtatcaaatgaaatgtgagtcattcttagttaaaaagaaaggaaggactgaaggaaggagggaaggaaaagaaagaaaagaaaaaaaagaaaagaaagtaagaaaaaatgatgccaagaatctatctcattaagatttgatctgagttgtagatcaaggaaatgaactattttaaaattccactctcacaaaaatcagccttaatccaaaaggtctttccttgaaaataaactaatcattctttgttccctagacacacactttactatttttacatttcatttggtattgaccctaagcttcaggacttgtatgtagggaatctatttgacatttctatttcaaaagctttcacacgagagaatgaatcattcacacttaattcctgaagataagattccatttgctttaactcttaatttggttgcattatattctactactacaaaaaaaaataaaaataaaaaataaaaaacactttttaaaatgaaacaaggaatgaaaagggagtttggaacctgttgcagtttgtgaatccctgctttcattttatgagctgaataaattatggcccaggacaaagagttcccatgatttttttacacagtattttaaaaacataattatctcacatttcagagttgtttgaaagaaaatgagagaaaccttacatccaagttctataggatttctttattacttcgtcaatcaatgattacagaatgatgtaagatcaaagaaaatatctagctttctcactatcagcttttaatctgaataagctaaacaggactgagagaaagcacatgatttctgccagaatggataggctttcattgctaatttcaactatggacttgtctcagtttaaccttttgaataattcctccgcaaatctagtttcacatccttggtcatttgagaaaaagacaaatcaggaactgaagaaattcagaaacaaattttgacccctatccagctttcttgttgaattatctttttaattctaaggcagtatacttctataatgaataaacttttcccaacaaaaatgaataaccagccattaccagctattaaaatagttatttttacatgctgaaagtgacaagttttatatattactttgagtttgtttggaggcaaaaaaaaaaaaagcagcagcaggagaggggtaggagggatcactgttgatctttgcaaaatcgtgttaaagtggaagatgatgatgatggggtcagaccagtaaaaaggtctgggtacagatccaacttgttaaaagttgcctggggaagaaggctataaaaagataaaactcttttaacaactattccagagtgatgtgttattagatacttggaaaagttgcaaagatccattaatgaggcagctttgttttatatggctgaaaagctgatgtcagttcttgaacccatcatttcaaataattgatcagtggtctctgtgatattctcaaaggtatatcctaactcaagaaacatgaaggtggttttcagaaaaacctctttgttagagttggacttggtttctccttattttcctggtgttatggttttctattgcaccatgacaatagtgaagacacagaggaagggtctgagccagaagacatgagcagggaactggacaaagtccaaggctggctagggcaataggatcttatttgggagtctgttcactatcgtactgagttatttgttcttttatcttattctattgtcaagatcaggcaactggttaattttgctaccccacttctctttgataactaccccaaaacttagcaattcagaacaacaaccgttttatcatatctcaccatgttgaaggtcaggaatttgggcaattcttctgctccttgtcacgtcacctggggttggtggacttcagctgactctgagcttgtgtcagaggtccaacactcacatgcctggcaccttggcagggacagctggatgtctgagctcagcagagcccatctccccctccatgtagtctcagggtcctctctgtttttgctccagcaggctcaaggctcctttcagaggccagacctggaactgcaaaacatcattctagccacactcaattgatcaaagtagtcacaggccagctcaatttaagaactcaactgaagaagtggtaaagcatttgcagctgtcttttaattcaccacacctgattctcttctaaattggaattggccaagcagttgcagtggctcagccttaggaggccgaagcaggaggatggcttgaagtcaggaattcaagactaccctgggcaacatagcgagatccttgtctctacaaaaaatatttttaaaaattagcctgtcatggtggtgggcaccaatagtcccagctactagggagcctgagataggaggatcccttaagggagtacaggttctggaggctacagctatgattgtgccactgcacttcagcctggatgacagagtaagaccctatctctaaaaaagaattcttcctgctagcatttagcttccaaacctccatatggtatgagagatataaatcattaacaaccattacaaatgatcaagtttgctgttaattaaagatgtgcagaggtaaagataggggcggcactgtaccttatggaagtggtaaataagaataaataataaattctaacacaggcaagcattcattaacaggcacttggtagaaacttctttcttaaggcacttcagccacctatttattccctgatccagtaatcccactcaagataattaatccagaaaaatcattcagaaagagaaaaaaaattatgtgtacaaacaagcttataggcgtcttattcacagctgtgaaacactagaaatgatgtgaacatagaaaaaaaattcaagtaaattatatcaaaatcttgttatactgtgtagccattaaattgataagggccacgcccgtgtagaaacataggagagtatttttaatgtaaataaagctaaaatttaaaaattgtgagtcatatgattatagtctattcaaactatgcctgtgagaatcaaaacaagaaaagaataaaaaaatagattttgttgaagtggtatctttttaatttgttttattttataatgttttaaagttctttcaagaataaacatttttaaacttaatgactatcccagaccacaccttcaagattcaataaacatgcattaaatgcctctggccttaataacatgtaaaaatctatttataggcacacgcactaacaaacatctttacatgaataaaatatatattttatacttttattttggcctatcacatgacagggtacaaggtgatataatgcaaaaaggctctaccgggagttggcagccctgagccatggtccagacgccccaggttcactggagaccaggcagaggatgcgacaagatgccagctctcaggttcccaactggaacatatggggcagaaagatcagcccatagatccctcctttaaattattgaatctggtcctctaaaagtattagcttttaatctgtggcctaattcatggctagcttgaaaaataggaaaatgatcagaatgtagtgtgctattagctttagccaattaaggtaaggtaaggttacacagtacatctgtgtaaacataactcttagaattatgctgactgattcttcaccagaattccctagagattaagaattccctagccaattaaggtgaggtaaggtacatgcatggtaacaggcatgaaaacgccaacaaaaagacacttcattcaacaggtatttatttggcacttgttgttctaggtattgtgaccaacatacaaaatgtcagcctttatgaagcttatatgctttttttcacttttttcttttcttgctttcttttttttttttttttttcagacagggtcttactctgtcacccaggctggagtgcagtgccatgatcagggatcgctgcaggctcaacctccctgggctcaggggatcctcccaccccagcctcccaagggaatataggcatgcaccaccatgcctggctaattgttgtatttttgtagagatggaatttcaccatgttgcccagggtgtcaagcgatcgcccccctcagccttccaaagtgctgggattgcaggcatgaaccatcgcacccggctgggaacttacattctaaaggagaggggagagcatagatgataaaccaaataaataaatagaacattgttggtcacattgtagtgctatggggaaaaatgaatcagggtgagagagacaattctggagggggagttggcaaacttaagtagggtctccagggaaggcttctgtgaaaactgcaattgagtaaaaaccggaaggaagtgaggaagcagctctgaggacacctgtaggcattctcacaggggtgggaagccactggggggtttggagcagagggtgctatggtctgacgtaacagcctcactccagttgctatgttctgacgtaacagcctcactccagttgctatgttcagacgaggctgtggcaaagcaaggtggacataggaagatcagttaggaagctatggcaatcatcaaggcactgcgataacaggtacgatggtgaaaagtggttgcatttggatatatcttgaaggaagttgttgcaagatttgctgaaggattggatgtgtggtggaagaggagtgaaatctaacccaatgtttggggccagagatgggaacaactgcagaaaggtttagccacaaggaagacaaggagtctgatttgggagtgtttagatgcctgttaggtgtcctagtggagctcgcaagtaggcagttggaggtacaagtctagagttaaaggtgaggcaccaggctagaggtataaatttaggaattaccgctagatggatagttaaatgacattaaagccacgagactagatgagatcaccaaaggagagcgcatagacagaaaaaacgtctgagcactaagccctcagacaaatccaatactaagaatttgtggagaaagcggggtccagccaggtaaatgagaaggaatggccagtaagtcagaaggaaaactgggagattgtggtggaaatcaagtgaagaaagcatttcagagaggagggattctttctggaacagcagttgtcagtggtggaatctacacttgcagattttccatgacaactgaagatgtcatggatatacagagagagatgtatatacatactgactagatggaaggctatttataatcgcacctcatgagaaaagcatatttgtgtgtcagtgtgttgtgccattatattcaaaatagaaatcagttttgaaacatccagtgtttcatggtttccatacatttccccacctccattatcacaaatgattgttcctaattgttcttatggctgttttccccttatctcatggagatgttatcgagatctgtgtgattataaatggaaaatattctaattttcagtgagtgggttaatgaaggagcagactgatcatgaattatttgctaaactagactctaaaaatgacttctacttatttgtgaatgttgaatttacattggattatggatgtgtaatattctgggaactcatggcgctttataaaaatgaagttggtctgtgaacatgttcatcataagaacatgttgaccacattttattccttaagccacttttcaccccaaatcctggcaaggaaatcaggttttcttactctctaatgaaacagggtgttttatttaaatcaccttccctggtaaacaacctgagagaagggaagaagaaatagatgtaactccgttgacagccttgggatatagacatcctgtctccattcctcttagctttactgggtatcaggctgccagtttaacaagggaacaaagaaaaataaacaatgatttttatcccactggacaatttatggaaataaccataaattttaaaattcaatcttgattatatcataaaaggattttcttggtctgtttgcatagctgtattttatcccattttgaaataatctggacttttttgagatttgtattgtacacaaatcttatttaccctaaaaatcttttataaaacatttctccagtaaattgtgctatataatatgccatgtggcatcatcgtaaaatacccaaatctgtacatgctcatctctagggaattctggtgaagaaacagtcaacataattctaagagttgtgttttcacagatgtactgtgtaaatgtactgagacagtacactaaatataactgatgggggcttgtcttggtggatatgggtagcttgtatgttgccttggctttattgattaatcttctacattactttgcatgtcctgcaaacccatgagcacctgtctccaatgcattcggtctgttttacagccttctggcactatctaatgaaaactataaaacgaaaatgtttcttttccattacggcagcaacaaaaatttcaggaatgaggccacaaaaataccataccacgtcacaggtctcttcttaatagtaagtctaaaagcagttagcattagaccttcacatcaggtcaaagaacatagaatttctaaaccaaaccttccttagacataacatttaaatgtgattattatcactaaaatagtgaagtaaaaaatagggtgagcataatttcttattatcagacagttttttgattgacataatcattcagtcacatttatgttatatactctgtttgaaccattcttttctgttagattgtaaaccctaaagattaggaaccaaagtatctttaaataagttttatctgctctagcacagggccataatgggagtgatataatccctctttgacatttaccacaaataggtatttactaaaactgccacctggtacaagcccactgtgctcacataagaagggaggaaacaatggaatatctgtggtggttattcactcaaggatatctagacccacttcatagataatgctttaaggtttctttttttattttataaagaggaataacatattactataacaagtaccagcagctttcatgatccctcccatccatccaatttctcccccagcttaaaaaacataggcacaactgtctgttaccgccacattctaaactctcctaagatttctctagaccaaataaagacctcagactcaggcctgccacgcagttgatttccaaatgggtggaactcttaaaagccccacttgtggccgggtgtggtggctcacgcctgtaatcccaacactttgggaggccaaggcggtcagatcacaagatcaggagatcgagaccatcctggctaacacggtgaaaccccatctctactaaaaatacaaaaacaaaattagccgggtgtggtggcgggtgcctgtagtcccagctactcgggaggctgaggcaggagaatggcgtgaacctgggaggcggagcttgcagtgagctgagatcctgccgctgaactccagcctggcagcctgggtgacagaacaagactcagtctcaaaaaaaaaaaaaggccaggtgcagtggctcactcctgtaatcccagcactttgggaggccgaggcagacggatcacgaggtcaggagatcgagaccatcctggctagcacggtgaaaccccgtctctactaaaaaaaaaaaaaaaaaaatacaaaaaattagccgggcgtggtggcaggcgcctgtagtcccagctactcgggaggctgaggcaggagaatggcgtgaacctgggaggcggagcttgcagtgagccgagatggtgccactgcactccagtctgagcaacagagcgagattttgcctcaaaaaaaaaaaaaaaaaaaaaaaaacccacttggttttcataccaagactcagaaaattcctaaaaagacaattactggtattggcaatgaggaggaacttcccagcacttacaatttttgtttaattgaaatacatttaaaatttcctaacaacttggttccattaccctttttttcaggtacagagcagttgcctcctggagtcgtgttcagggaattgggattcctttggtaactgccattgaaattgtctccatctggatcctgtcctttatcctggccattcctgaagcgattggcttcgtcatggtaccctttgaatataggggtgaacagcataaaacctgtatgctcaatgccacatcaaaattcatggaggtactaaacgtttaaaaggaattaactggggaagggaggaggtcctccgttagacttcaccatcttgagacttgatgacatcgccacaatgtcaagtgtggtttcttctgtcaaatattcctcagttgcatgaaaagtagatgttaaacctgtgtctagattcttgaatagaacagttatgctggctttcactcttgtattataccacaatggtagacatatctgttattctgcaccaaaccactaagaataccaaagcaaatttactaagagggactagatgtgtgtgtgtgtgtgtgtatgtgtgtgtgtgtgtgtgtgtatatatatatatacatatgctatttgtttttataataatgaatacaacacaacaatttccatctggaagacgtgctgatgtttatcttatgtcacttggggagaagcacatttctcacattctttaaagatggatttactaattcaaagtagagagtagtacttacatgtacttatattagtacggtttctatgtctaatatacaaataatataaaattgtagaacttcttaaaataatattttggtttaacaaattcagttgttggtttttttagtacacctgaccatattaatgtttttctgaaaagcttaatcacatgactgttttgggaaacctatttaaaatgcatcttttctttgcaaaactagttacatgtggactgaggaggaaaaccaaaaggataactatttctcttaaatcagtataatttagtgctttgatgtaagtttcatgtagctcacattccacatgtaattatttacagacatctcaaggtatgctttcccaacttggaaaattcacagaattcgtggttttacagttgaccagttatcctgcttggaaattcttgttttaaaattaaaagtgctcatgaaaactgccaaactaacaacttaaaattgaagtttcttactgggttagtcttcaaagtgaaaaacaaagtagacagtaggagattgtcagaatttgggctgtgtgaataagcaatctagatattccagatgcaaacattagagaaaagaggttcactataagaaggagcttactaatccttacagccagacaaaatgaaatgggctgtttcataaagactgtctcctatctagacgtgttcaagtaaagggtagctacccttcaggcatgggtgggctagacggttgcagtaaagggtatgagttgaacagataattttttagagttcattccaagtctgaagtcctgttctctttttctaaatttatttcccctattttttccattcttgctcttcaactttaccctagactgatggtaggcccctctctacccatgttgatgacatcagttccaaagagatgcattacccatttctctgtgggcctttgccatggagggggcaggggactccattcagccctctcaagggtcagcctctagaccctctgcagctgtttctgcatcatttatacccagccagcaaatgcacccggaaaaagaggatacaaaagaagggagaatgggtgctcaaaggagtgttcgtgttgcacttcaaaaaagagagagagagtgcttctgactttttttaagttcaggactgaaatctttctacagtgtgttgggaacagggaaatgtttgtgtaagcagtttagaataaaccaactcctttgggagtttgcacttaacctgaggatagaattcagggatctgtgaacttggttggaaaagaaacaacatgtttattttcactaacttctaactgaatttattatttccttctattatgaatgtacccaacaaatcaccatagtgtttaccagtatcatgactttttcagtaataaaaatagcagacattttcatacgatataacacttgtataatctcaaaatattatttatgctcttcagaacttcaacacttcaacagttcggtagttattagaaccatcactaggtttgttatttgtgaataaacacaatattactatatctaaatttaatttctaatattttgatagctgtgctttaatgtaattggtttccattgcaatcttatgtattttattttatgcatgtaaaagtattattctcagaagggattatagtctttaccagacttccaaaagggtctgtggcataaaaatagtcaagaactcctcccccaaattttttgtctttaggaaccatttttagattattttaatagccatgttataaatgcagccttcttagcctctttctatattcagaaactgtcccattttttacagagcaacatgattattttttactgtgggaactgcattgtccttagtaaattaacaatctgaagaagcactataaggaaagaaaaagcatttcgtcccaagttggtgattaattttgtgggaagaagaatttagatatcatttttcattttccatttttatagggtattaagttttcttctttaagcagaagtaaaaccgaataatctcggtatttataaatcctgcccagttagataataccagatatgcttcagttgagatatgctgcctcaatagtttccaggtggtaagtattaaaggagggagaagagtatagctattgaagttcaaagcggctggctttaaggtcacatagcaggcataccaggcagagggttaacccctattaaccaaagctacacagataagccattcgtaaccttcaccgtttcaggttaaatacactttcaccacaatagtcaaaagtaaagcaggcgctaacaaaattttgaggttcatccagaaataaagataaacatgtatattcttttgtctcaaaatcatgttttatgagctttagaaggacattatttttattgattagggctcttccgttgtgtagttgaaaccttcaatctatgaaaagtatcaagtatccttgtcaagataatttttgtaagtgcagtttctttatgtgctgtttaaagccaggataatttctgaagcttccaactgaattgagttttgagccccactcccaaacccatcactgcaaccagagagcatgattttacagatgtatctgcaagtttaaagaccttaaagctaccagaggcacagcatggttaattgacatgactctgctcctccttttctctttttttttttttcactttgaagttctaccaagatgtaaaggactggtggctcttcgggttctatttctgtatgcccttggtgtgcactgcgatcttctacaccctcatgacttgtgagatgttgaacagaaggaatggcagcttgagaattgccctcagtgaacatcttaagcaggtaaatcccataacatcatgaaaatctggccaggactggttagtccttgacagcagcaggcctgcaaataccatctttagtagaattagcctgatttcctaaaataaaaatactatcctgtaactgttttctttatagtaatagtgttagaaatttcttttgtaaaatgggaaacctgcttgtaaaacaagtggtcctgaaggctgggcccaaatagagaagaactatccctctattttgccaagagtgtactgagcatgtgtgtatgtgagttcgtgcattcaattgggcttgaaactgtaccaggacacaaaaaagcatgtaactttctccccatgcagatttacagtcttgttgtagaaataaaatatgcatgcaaaacaactggaatatagaaccacaggtgtggtaaaagtagcctgtgctatggaaagccaggaagggtatgagatagagtcatggggaagctgttcatggatgagggggattgaaccagaccttggaggataagtgggatttgatggggaagaagttgacagagagcatttcaggtggaagaacaggagtctagttagaacgtggaataggaaccatgcatttggggaatgggaaaaaggagatgaacctctctagagcaatgtctaatgtgagacttatgctaggaaatgggatcatgtacattagaagaggtaaagtgttggaggacccaaagttctagaaggaatttgaacatgtcaataggaggctaatgttggtccctcctgggtgaaattagaacagataaagctgtgggctttcaagggcaaaactagactcatacttggctctctgaccttgggcaaattgcttaatctctctgaacttctagtttctcataatatgtatgtaataatacatcatggggattacctgagacatataaggtgcctaatagtacccagctcctagtaggtattaagcaaatgttaatttacattaattctaagaggaaacctaggacttcaggtaagttccctgttgcaacagaaaagtatataatggtggccaactacaccaaaagttaatgtgagttgttgatggagtctgtaaatctgtcctatataattaccatgtgcaagcatagttcctcatcagcaactcttcaactactatactgatttttctgagcttcagcttttcatctgtaaattgggcataatatatgaatcaatagtattatgaggatcaaaaggatgaatgtgtatgcatgtactttataaaatctaacatgccatacaaatggtagctattatctttcattgacatttagcaagaagattacattgagaaaccttagtatgactttgttcaggcatgaaagtttcaaatactccaattgcttaatatgtttacaattatttcctctcattcttggaatggaggtagttagtatgggtttgtgaaaaacagtgttttaaaatatggatttttgcattcgcaccatgattgagcctgtttaagctatgagtggtatttgctgtggaaataattaaatagttaattatttaattttggaataatattaattatttaattgtggaaagaaataattgtcatatgctgcttcatgtttacacagcattttttaagtttttaaagtgcatttccatttccatgtctttttcttatttgattcctccaagcaccctctgagatcagtaggatatatattctttattatacaggtgatttagaggtttgctcaaccaaatggagattagaacccaagattttgtcctcatgcagttaacgttccttttggtgccactcaaatctgtagcaaatcctaagtacagaagagcaagtgtggctgaaagtcctgcagatgggactgcgggagaaacagcatagagcacaaaaccttgccatcttgactaatactctgtggggctcatagttttgcttcttgcttggttgtctctaatttctcctcatcataatgatgacagttttatcaagtaggggttgtgttcggatgctgggaacacaaaacccaaaataactgttagttgaccaagaaggagtttatctttctcccatagcaaaaagttcagacatcaagatttagtggtcaagccaagttagaggccaggtatctactgttttgctgatctttgcttcagtctcaggagactgtagcagcagctctacttttatatctgatttccaagcagcaagaggggaagaacagaaaacaacccgtcatgggtgtgcatcaaaagagtgtccctatacttctcagtagctcttccggaaacccatgcaatggtttctatttcatctaacgggtcaaaaccctgccaagtggccatgtagataattaggccaggttccccagctgccttaacaaatcaagaccagagtgatggtaaggaagacaggagaatggatattggttaagcaaatatcagactatcatggcagtgtactaatactgcttttaaaagcgttatcctctttgagtatgcactcaggaaaggtaacctctcccctaatacactgcttttctatttttctgggcacactgtctttctggacacacaaaatgacccttttaaaaagagcccccattcctgaagatttgaatattttatttcttccctcagtcattactccggagccatatcccagctagcccaataactatgagaggttaaagaactcccagttcctttagctagagtagcgagttatgaaaactgccccagaatattttgaatggctcagccaatcatgtgagtttattgtaggcttcccggacttaatgttatatgtttcaggttgagccagcattacccttccagaccctgtttttaatcagttttattttgacattaactgatcccagttacagacaagttgcattttgtgttcctagtcaggcttctaaatgcatgcaatataatactcaaataatgcacaccaatgaatggttgcagataattcctaatttatagattttctgatcctgagcagactgaaaggcatgcaaaccttccatgaagtccgtccaaggtcagcatgtttcagattttctagtcatcactgctgataatcctttaccctcatccttctgcttgcaaacaacatataatatttttatatgtcattaagaaactacatgtcattaagaaaagaatttaaagagcaaaaaatcccaataatagctatgttcaagatcaggaaaaggaaaaaacatagtgctatgacttttccttttctactccccactcctattttgttttctccaggtctttgttgatttgtccatgcaatatcatgtgatgttcagtctccttgccttccatgccatcattaatgctaattagttacctgttattaagagtcattagctaaccctttcccccatgcagtcacactccaccccactacacacacacacaggcagactcagccacctacacacacacagctgcagactcagctggctcacctccagccagtttccacctctctcctggcatataacctccgtcctggccctaataaccaacctgaggcccccatccttcctggaagctgcccagaagcatcattagcaattccttcgttagaacactgaccttagaatcttgaagaggtagaggcagtgtaagccaggctgttctcctggctcttctttgaattattctttctctggtgtctgctacttcttggtactgtagttcttgcatctagtataaaaacactaaatttgttgtcctatttttttctcactttcctttagcgtcgagaagtggcaaaaacagttttctgcttggttgtaatttttgctctttgctggttccctcttcatttaagccgtatattgaagaaaactgtgtataacgagatggacaagaaccgatgtgaattacttaggtatgatcctgtgtactcgctagaaaattggagtttctcagattttcatatttataatacttttacaaaaccagctactctacatgcccgttagccctgaaaattaaaactgcaaagttgatttttttctttagctgacatagcctataactgatcccaaaatgtgtgcaagccacatctgttatcttgcccctcccctcctgaggctgtgcataagggtttgagctaaccaactagtgatgtatctgtaactgtcctgcaaaactgaaactgccgtttaaacaagcactttttacaaaattctaactgccacccatacgaaatggcttctgggcaagaaaaatgcttattctaggaagaaatgctagtgagcagattttaaaacaatatattctaattattctacaccattttcttttgctctagtttcttactgctcatggattacatcggtattaacttggcaaccatgaattcatgtataaaccccatagctctgtattttgtgagcaagaaatttaaaaattgtttccaggtaagatgatttttcaagtattttttaaagacaacaaaatgagtatattaaacagtcaacagacacagccaattccagttgtaatattactttgatcagctatactactttttagcagtgaagtgaaaatcatgttttattacccagaaagagagtcagattgtcggcataacagaaaagcagttcctatttagacaaccacatacaaagaggttaaaatcaaaaggactaaatcacatgccagtttagaaccctcctttagagagaaatgtttcaatgtatgctccaggccacagagagtacataagacctattcataccttactttgtcttagacttgaaccaaagtcttgacaaaatataagctctattgttaagaaagcgctcactgatcgagaccatcctggccaacatggtgaaaccctgtctctactaaaaatacaaaaattagccaggcatggtggcgggcacctgcagtcccagctactcggagaatggcgtgaacccaagaggtggagcttgcagtgagccgagatagcgccactgcactccagcctgggcgacagagccagactcagtctcaaaaaaaaaaaaaaaaaaaaaaaaaaaagaaaggtctcactaaatgctgtttaattgtgtacttagtaatagaatcttcaaggaaagtaaatgcttattgctgtgggaatctgaacaaatataattttattcaaaatcagtttccttctgctttcaaacctccagccagctcagccacccatgtccttcagaagctctaagcctgtcttattgatgtgtaattttctggttcctgaaatcattttagcataggcttaatcctcactggattttgttatcttggaccaggctgtttaactttagcttatggtacatatgaggcagagtgcggtagaggtcaagaatgcaggctctggaagcaaagagcctcgatggacattacagccctgcacttgctaactatctaccccaggtagtgcctctcttgctttttcagtttcctcacctataaaattggatgatcacagtatctctctcataaggagggtaatatatgtaaaatgcttgaaataataagtgctcaatatgagttgattactattagggacagagtagagaggaaaaacacagtaacgacctgcatggaacttacagtctaaacagaggcagacatatattaaccaaggaatcacacaaacagatgaaactcggtatggaagtttggggccgtatttctgaggtcttcttggaaatgtttgccagtcacaaaacactcagcccaaaatggattgactaacatgcaggttaaaattagtacattatataaggtgaaattaattattacttactcattaatttacatattcattgggggagggaaaatcaaggtaaaaattatcagaaattaaccccactttttgatgaatcttcctaaaaaggcagtatatccaagagaaagagcccaaatctagagagtcctgggttctaattccagttctaactctcattatcctctctggacctcactgtcctcattcataaaatgggggaatagcataaaatgggagaacatccaaggctgttgtgaggatctgataaggtacctggtgcggagagccacacaggtggtgcacactgaagaaacgctaggacccccccaccagcccagccctacccgtgcctgccccaagctgtggagagcccttcctctcacctacagtgccttccctttctcttgcacttggtaataaaattaaaatgagaaacaagggttctatttctctgcactggaatggacagtgtaactcctgcctggtgataacaggctctccactctaggttactgtcaaggttcacttccctcgaatgcgaatggacatttgcccctcattagcatggcccagggccgctgtgtttggccgggaatgggctggtaggctcgccttacttcgagtctgttccttcccccagtcatgcctctgctgctgctgttaccagtccaaaagtctgatgacctcggtccccatgaacggaacaagcatccagtggaagaaccacgatcaaaacaaccacaacacagaccggagcagccataaggacagcatgaactgaccacccttagaagcactcctcggtactcccataatcctctcggagaaaaaaatcacaaggcaactgtgagtccgggaatctcttctctgatccttcttccttaattcactcccacacccaagaagaaatgctttccaaaaccgcaagggtagactggtttatccacccacaacatctacgaatcgtacttctttaattgatctaatttacatattctgcgtgttgtattcagcactaaaaaatggtgggagctgggggagaatgaagactgttaaatgaaaccagaaggatatttactacttttgcatgaaaatagagctttcaagtacatggctagcttttatggcagttctggtgaatgttcaatgggaactggtcaccatgaaactttagagattaacgacaagattttctactttttttaagtgatttttttgtccttcagccaaacacaatatgggctcaagtcacttttatttgaaatgtcatttggtgccagtattttttaactgcataatagcctaacatgattatttgaacttatttacacatagtttgaaaaaaaaaagacaaaaatagtattcaggtgagcaattagattagtattttccacgtcactgtttatttttttaaaacacaaattctaaagctacaacaaatactacaggcccttaaagcacagtctgatgacacatttggcagtttaatagatgttactcaaagaattttttaagaactgtattttattttttaaatggtgttttattacaagggaccttgaacatgttttgtatgttaaattcaaaagtaatgcttcaatcagatagttctttttcacaagttcaatctgtttttcatgtaaattttgtatgaaaaatcaatgtcaagtaccaaaatgttaatgtatgtgtcatttaactctgcctgagactttcagtgcactgtatatagaagtctaaaacacacctaagagaaaaagatcgaatttttcagatgattcagaaattttcattcaggtatttgtaatagtgacatatatatgtatatacatatcacctcctattctcttaatttttcttaaaatgttaactggcagtaagtcttttttgatcattcccttttccatataggaaacataattttgaagtggccagatgagtttatcatgtcagtgaaaaataattacccacaaatgccaccagaacttacgattcttcacttcttggggttttcagtatgaacctaactccccaccccaacatctccctcccacattgtcaccatttcaaagggcccacagtgacttttgctgggcattttcccagatgtttacagactgtgagtacagcagaaaatcttttactagtgtgtgtgtgtatatatataaacaattgtaaatttcttttagcccatttttctagactgtctctgtggaatatatttgtgtgtgtgatatatgcatgtgtgtgatggtatgtatggatttaatctaatctaataattgtgccccgcagttgtgccaaagtgcatagtctgagtaaaatctaggtgattgttcatcatgacaacctgcctcagtccattttaacctgtagcaaccttctgcattcataaatcttgtaatcatgttaccattacaaatgggatataagaggcagcgtgaaagcagatgagctgtggactagcaatatagggttttgtttggttggttggtttgataaagcagtatttggggtcatattgtttcctgtgctggagcaaaagtcattacactttgaagtattatattgttcttatcctcaattcaatgtggtgatgaaattgccaggttgtctgatatttctttcagacttcgccagacagattgctgataataaattaggtaagataatttgttgggccatattttaggacaggtaaaataacatcaggttccagttgcttgaattgcaaggctaagaagtactgcccttttgtgtgttagcagtcaaatctattattccactggcgcatcatatgcagtgatatatgcctataatataagccataggttcacaccattttgtttagacaattgtctttttttcaagatgctttgtttctttcatatgaaaaaaatgcattttataaattcagaaagtcatagatttctgaaggcgtcaacgtgcattttatttatggactggtaagtaactgtggtttactagcaggaatatttccaatttctacctttactacatcttttcaacaagtaactttgtagaaatgagccagaagccaaggccctgagttggcagtggcccataagtgtaaaataaaagtttacagaaaccttg

SEQ ID NO: 148 - DNA, 18388 bp, Homo sapiens
agccgctgcgcccgagctggcctgcgagttcagggctcctgtcgctctccaggagcaacctctactccggacgcacaggcattccccgcgcccctccagccctcgccgccctcgccaccgctcccggccgccgcgctccggtacacacaggtaagtcgcccccggcggccgccgaggaccaaagctgcccgggacatccacctggagcgctgaggcttcagtccctctggtggaccccggaacctacactctccccgctcgcctaccccagcccgctcctctcagccgctggaggactcttcagggcaaggctccagagccatcctctccagccttgaggttcacaaaccaactcatcaggacaccccaagatttccttactctctgaagtcctccttaagcctttgtatcagcactccagggaagagtctgtacttcccctgccctccctgcaaccccaaactacagttcctgatcttgctcaccttcgacttcccaaaagcccccaaattgttggtcttgcgccccccacactttaaaaccagcatctctttcctccacctctctctctctctctctctctctctctcatgctctctggaaagtaatcctgttgtccttcatttcagcaaacgcggggtcaaagagggatggtcccggccctgtccccatgcccagccccgtttctgcgcaccgtccctccctgcctagctgatctctgaccctcggctcttgtgcttcctgctacaggatccctgctgggcaccaacagctccaccatggggctggcctggggactaggcgtcctgttcctgatgcatgtgtgtggcaccaaccgcattccaggtgagtttgtgtggcacctttaggggaaggagggacaaggaagaggtgctggctatcccaggtgtgccccctcacgtgctgtcctctccctcttgagcctgactggacatcaggacgcagcttcactctgatcctggtatttattcacctctttcagtggttgccaggagttttcaccccaaccctttgtctccacccctaaggactcagccccctactgctggtcccagcctagaaagctcactttgtgttctctcctgtctaacagagtctggcggagacaacagcgtgtttgacatctttgaactcaccggggccgcccgcaaggggtctgggcgccgactggtgaagggccccgacccttccagcccagctttccgcatcgaggatgccaacctgatcccccctgtgcctgatgacaagttccaagacctggtggatgctgtgcgggcagaaaagggtttcctccttctggcatccctgaggcagatgaagaagacccggggcacgctgctggccctggagcggaaagaccactctggccaggtcttcagcgtggtgtccaatggcaaggcgggcaccctggacctcagcctgaccgtccaaggaaagcagcacgtggtgtctgtggaagaagctctcctggcaaccggccagtggaagagcatcaccctgtttgtgcaggaagacagggcccagctgtacatcgactgtgaaaagatggagaatgctgagttggacgtccccatccaaagcgtcttcaccagagacctggccagcatcgccagactccgcatcgcaaaggggggcgtcaatgacaatttccaggtgaggcttcttctctgagccctgctccgtgggatcatctgctagacaggtgacctgccaggagggctacaggaaatcctgtctgtaaactaacgcagcagttctcagattttaggcagcatgagcatcacctggagggcttgtgaaagctcaccctgctgcaccccagccccagagtctgggattctgtaaaactgcaactctaacaagtaccaggtgatgctgatgccggtggtctgggaagcacactttgaaaactactcaaggaaacaagaaatggttttcctttagcagtcagcctgttcaagccttagatactccttaggctcttaagaaaagagcttatttcaaatgcattcccccaattttaatcttgtttgaaatggatactttctatgggcagaatcagtaccactttgctattggattcctcatggggatgcagctggtctcacataaaaggttaaaatagcagttagttgttgctgttacagcttcatctgtgccttaacttctagatctttgcaacggtggctttgaactcccacatttaactctttgacactggaaagtgtcattatatcctctaggcttaggatcagattccatttcctgtgtacccaagtaggctgataactgaattctttgtaaaatactcaagacttggcagaagtcacaattaagattttgaagttgtttggcgattaatgttgctgtgttattttgacatagtgatcttaagacagctctttgaagcttttagaacatctattgtatgcttttcctagcatacagacagtctcccccaaccccatccccaccccgctctgcattctacaagtaatgtgtgtcctctgcccacagggggtgctgcagaatgtgaggtttgtctttggaaccacaccagaagacatcctcaggaacaaaggctgctccagctgtgagtacccctctatttttagggcacatagggaatcagggggaattccaccaaaaacaaactgaggaatttagcaatagtggttatacataaattacccccagtgagatcatcaagaggcatacagaagtgactccaaggggtattatacacacacacgtatacacacgtgcgcatacacgcaacccctctacctgcatccttcacaccaaatgaaacgtcttctaccactaagaactcaagaggctggttggtaagagtatctatttgaagttttcattttgtttcttgccagctaccagtgtcctcctcacccttgacaacaacgtggtgaatggttccagccctgccatccgcactaactacattggccacaagacaaaggacttgcaagccatctgcggcatctcctgtgatgagctgtccagcatggtcctggaactcaggggcctgcgcaccattgtgaccacgctgcaggacagcatccgcaaagtggtcagtggcctctgcacccagcccgttagcatgaaccctggaaggtttatcgcagatggtcccaaatgactgaaaatgcggggggacactaatgatattctctcccatttagactgaagagaacaaagagttggccaatgagctgaggcggcctcccctatgctatcacaacggagttcagtacagaaataacgaggaatggactgttgatagctgcactgagtgtcactgtcaggtaagggaccttcaccagccagaataagaatcgacggcttttgtttgaacctacatctttggggaaataccctaatcgccacagagattctttttatgttccatggcctgataacaaagtgttttttttttctttaagatgcaattatggcatctataagttcttctttaaactctcagatggtttatcaaagtattaattataccccaggctaagtatctaagagaatgaatctactaagacatctgaataatttacctaccttagttcaaagactaagtgttgaatgtcaggtaaataaaacctggttggaacattcatttttttttcccaaccctgatttatattcagctttggcataggttcttttagtacagtagcaattgtttttcaaatcacttagtctgacactgttaggatgttactgtctgctttgctcagatggcactgccaggtgtgtgattcactctagcatccccgcatgccagtggccagtgagtttggaggttcacctggcttatctattaatagcaaagtatttgaatttgcttaaatacaaatcacagatgactggctgtgggaaccaacttcattaaattccctttcttttccaatataaagacagatcacagatctatagatgaggaaaaagtgcttatagatcttccttcctccccccaaacacataatataaaaatgtaaaagtcctggctgaattttctgagtttgatttcagacatagatttgacccatgatgtttgttggttcctctgctataaattctttgtactgtaacttccacccttgactaagtagcaattaaaaagaactttccaaggaatggagtgacacgtaaactagcactagaactgtctctacgatagtggtggctgcaaatatgacagagacagatctatgaaaatcattccactagagcattgacagccctgaccatgttttggcttgtaaaggaaatgttacaggatgtagacttctgtatgcaacatgctcagcagcctgttcccctctcactctcttgccctgcagaactcagttaccatctgcaaaaaggtgtcctgccccatcatgccctgctccaatgccacagttcctgatggagaatgctgtcctcgctgttggcgtaagtttctcaaatggcatagctattcttcagtgactaggtcagttctacatacatcctagacagccgagcacaacactggaaccccacccccatctccatcatgcttccattcagtttcttgctgcagcagctggttaactgacagcttatctgctgtacagagccaaaactccattatgagtacatcgtaattacccatctggattgcagtaatggcagtgaagatcttggtatagctcattaattctgattttttgctttgaggaaaagagatgaagacgtggcagcaacagctctaagttgactgcttttagaatttgaccttagtggcacagagttaagaaaaatctgctcaccagagatattgacaggcttactgtgtaagcattggcctgatcgggcctggaagttttgcccctttcatctgtagggataagagggcctaagagaatagcagcaatctgagctctagagcaccaaaagaaataaggcacgatatcgttccatggcacgttatccctggcttttgttaccagtaaaatgaatgactttgctgagacaatacttagtgtagcaggtacaagttataaaagtgattcattacaactaagataaggaagaaaacaggaaaacagcacttgcccttcacacacacagaaacacacatgcacacacacacaaacacacccttgtcacagctcagaataaccaattccatccagggatcatattagcgatattggcactgtaatggtcgtttttacatttattttctgttccgcattcacttaacatgtgcgttaaaaggaacaaagctagctggaggtagcaaagttttgaacttgaatcagggattgctaagaaaacttacaactaatgaccacagaaagtaagttctttgtcttctgtctgatacagctagatgtgattgtagccgtggtgcctgggcagatggtaaacaaacatgctgtcctcttatgacaatatgtgcagagaaggccccaaacgctggggtgagaggaacaacaaactgactaactcacggccgagttggagccagaaccaacaacagctcggctgccttcacactcatctgtcaaacacatggtgtatggctcccctgacagaaatgactcctataagcttcctcatactcgcgcattcttggaagtctgagactggaaatgcctacccagatatgttaagtcagtaaaggaaaactcatttgcaatgctgagaggagaaagaaaatcaatgaataggagagcatacactgtgggaaggctcagctgtactgagccaggcaaagcatccgattaccccactgctgtacacatcatgacctgggataaacccctgggccgttggcctaagaaatatgttgcttttcatcctgtataactgcaactttgtgccggctcatattatgttctagagagctcatgtacaccatggtgaccatagttaataatactggattgtatgcttaaaatttgctaagagagtagatcttaagtcatcaccaaaaaaagtaactgtaagatgatggagatgtgttaattagcttgacggtggtaatcacaatatatgtgtatatcaaaacatcacattatacaccttaaatgtatataatatttgtcaattatacctcagtaaagccaaaaagaaataaatatattgcttttcaccctctggcaagtggagggccctgaacagagccctctaaagaacagcttgtcctaatcatcacgtacctgatgaacctctgtttcccctgcagccagcgactctgcggacgatggctggtctccatggtccgagtggacctcctgttctacgagctgtggcaatggaattcagcagcgcggccgctcctgcgatagcctcaacaaccgatgtgagggctcctcggtccagacacggacctgccacattcaggagtgtgacaagagatgtaagcatcttagcctctcagggacgtggagaactgacctgtccttgttgtcgtcaccaagggcagctccacagcatgtatattaagaacacgggttctaggatctctggatcccaatcccactgcttagctgtgcacccttgaacacaacttaccctctctgaggctctttcctcatttgcaacttggagataataatagttcttgataagtttatcttgagcattttatttagatactgcatgtaaagcagttagcactgagttttggtttatggtaagcaccctgtaaatgttaggatattaacagcaacccataaaaacagcgaacttatccgttctctggtagaaaacattccatgttgacatttgggcatgtggccaggagccaatttctaccgtacactgggtttagttgccattgaccatttcctggaaatacttctgcgtgctcctgatgggagcctctatttggctgtctctaagccaaaaccatttgtgaccatcaactctgtactttagttaaacaggatggtggctggagccactggtccccgtggtcatcttgttctgtgacatgtggtgatggtgtgatcacaaggatccggctctgcaactctcccagcccccagatgaacgggaaaccctgtgaaggcgaagcgcgggagaccaaagcctgcaagaaagacgcctgccccagtaagtgtgaggtccgctgcaagggtgagcatgggcagcagctctgcccagctggttgcctggcatctgcagcctgcagttcagtgggtcatagagcaggaaggttacctactagagaaacaaacagaagcaaagtcctgcaggctcagcaacttcttttaatgaaaaacaaactcaccctcttccccagcattctttccatgtgtcagagaagcagaggtttcttgaacgggcttaggagagtctatgacaagggagggatttgaaagttgatcttaattgttgcctgtggttcatcttcttacagtcaatggaggctggggtccttggtcaccatgggacatctgttctgtcacctgtggaggaggggtacagaaacgtagtcgtctctgcaacaaccccacaccccagtttggaggcaaggactgcgttggtgatgtaacagaaaaccagatctgcaacaagcaggactgtccaattggtgagccacgcagcccaggatgaaacgacccaggagctttgctcttttactgaatgctgcagtcagcattcgaggagattccagcttggttagtcctgagcgatttgattgctctaagatgcaggtggacaacataatcccaacaagttatcggttccctataccctataatatcttacactgtgttaagtgcccagcatggcagtatggcagcttagaccaaccatttactgtgactgtctctctctccttgtctcagatggatgcctgtccaatccctgctttgccggcgtgaagtgtactagctaccctgatggcagctggaaatgtggtgcttgtccccctggttacagtggaaatggcatccagtgcacagatgttgatgaggtgaggaactgatggggctccgagtttctggatctaggaaagcagctaacctgtgcagtcgcttccttatggcagtgacttctaaacatgatgcacgctcttatttcctccatagtgcaaagaagtgcctgatgcctgcttcaaccacaatggagagcaccggtgtgagaacacggaccccggctacaactgcctgccctgccccccacgcttcaccggctcacagcccttcggccagggtgtcgaacatgccacggccaacaaacaggtacagtcaactagacgagtaaaccagaggacaggagagctgtccttgaccaaaataactgggagcgggaggaatgtaatttcatacccttcaccaaaaaaaaaagggcgaggagatgaatgtacggtctagttttagaaacgtgattagaaaatccatggtaaatcctgcaggggaaaaacagtcttccatatttaaaaatgctgctctggaataagttgtgagcagatggacttgtaaacgcctaggtgctgagcaaattcaagaaaaataaacataaagcaaagtttgcttatagcctcagggagaatggggagggacagaggtaacccacactcttccaaatggagcctctgtctactcagagatgacagggatctggattcttgtttccatgatatctgaggattctcaaaagctctgtgtaacagcagcatggtgtaccctcaggtgtgcaagccccgtaacccctgcacggatgggacccacgactgcaacaagaacgccaagtgcaactacctgggccactatagcgaccccatgtaccgctgcgagtgcaagcctggctacgctggcaatggcatcatctgcggggaggacacagacctggatggctggcccaatgagaacctggtgtgcgtggccaatgcgacttaccactgcaaaaaggtagagccaggtcctttgtgtgcctccagaaagagggcccatcaccttatcaaaacacaggctaaggaattttaaatacttaaagtttggacatgaaactgaaagattaaatctcccaaagggagaggggcactaattcctattaaaattaaatcacttggtgccaaaaacatgaacagggctagctctttttgggcaactgtgttccatagtcaactcttctgtccaaaaaaaagttcagtactctatccaaataccagcaaagcatgacttgtgttcacaacatctataaagcctagagcatttacacaaattctgtatgtatatcccccaagaaaagttttattttcttgtcttcccataaaaaaaatatgctgttactgagccaaattctgttctttttctatttggaattccaggtacactccctcgtgcatgagctcagcatgaggaaggcaactgaagcagtgatatatatcttctctttcctaggataattgccccaaccttcccaactcagggcaggaagactatgacaaggatggaattggtgatgcctgtgatgatgacgatgacaatgataaaattccagatgacagggtaaaaacagttttctatccctttttcatcttttcagttcagcaacagcctgaaacactttgggattcaaggaaattacatggctatagcaaaaaatataccaaatcaatacacaggataattagaaattattcattgtgttccagtagtttaaggatgtagatgttgccaagagaatttttaaatgagggttttgtttttcatcagaactgtttttctctgtacttgagaaattataatgcataaacaaatgccactttgttccctagattcatttcaaatgtcacatcgaaattacagtaaaattgactttgggcacactatgaactgagatgatgggattatattctacatctcactaacttctaacccacagggatccatttttttaactatgtccttttaacttttgtagtgatcgttttacactgagtgatcaattagcctatccactaggtagaaagtattgctgattttcacagttttagacatattatgcacatggtttgaggcttgagctgttttcaaggacaacattgttaagtgctccatttcttctctttgcaggacaactgtccattccattacaacccagctcagtatgactatgacagagatgatgtgggagaccgctgtgacaactgtccctacaaccacaacccagatcaggcagacacagacaacaatggggaaggagacgcctgtgctgcagacattgatggagacggtaaggtgctgcctgatcagagggcccgcgggagacagggacatgcacagctttccaaacgtacttctgtctagtcctggctattagtatgcactttggtggaaacatccaaggctggagagcccagctcttatttgtcccttgttctcttcaggtatcctcaatgaacgggacaactgccagtacgtctacaatgtggaccagagagacactgatatggatggggttggagatcagtgtgacaattgccccttggaacacaatccggatcaggtaggtggatggactcctttcagagtctttcagtaaactgttggaatatccctttcatggcctttgaaaaatgagcttaacaaagttcaaacactttcattactgtggctccctggcttctcatagccaactggaatacgttcatgtaaataatttgcctgatgtgagctccttgcacagagtctcacagatctttagcatgaagatctggtaacttcagtcttaccttctgtaagaagggctactggacttgctcagcatcgtctaccattgttaagacaaattatacaaagcagacatctgtgactgacaactgtacaataatattaatcatatgtaatactaagagatggaaaaataaatgtgcataagcaaaataaccattttcatggctaatgatgtaatctagctataagaaaatcatcaaactaaggatacatccaaaaccaaagtaatttatccctgtcataaacattacccagacagtatacaacacagggaccagtggtctgtttccatcttttcaggacttttcagagaagtcgacgtgtcaacagttttacaactgaaaccttctaaggaaattctctgttataaagtatccagaaaatttcatttaacattaagatgtaaacagttaacatttcatttcatctttagtaattaaatatcactctatttgaccttatttagaaagttttatatgtaaaacatttttaaattatcccttctcagatttttatacgaaaacaaagataaaggaaaaaaacttttaaaatgtaattgctactattgctatctttctgcaggagtgtgtaaatagacatgacaccccactggctgtatcaaacaatggagaattttccctgtggtgggggcataagttatctttaacatgaatggtttatactgcaatttaccctccatttacatctctctttcagctggactctgactcagaccgcattggagatacctgtgacaacaatcaggatattgatgaagatggccaccagaacaatctggacaactgtccctatgtgcccaatgccaaccaggctgaccatgacaaagatggcaagggagatgcctgtgaccacgatgatgacaacgatggcattcctgatgacaaggacaactgcagactcgtgcccaatcccgaccagaaggactctgacggtgagtcatgggagccactttctaagacagggactgctggcacagctgtgtagattgaagaaatgaaaccaaggctcaaagcatttgacaggatgaagggaccaaatgccaacttagacaagatagtgacatttctgacaccagtaataataatagcactttagaattttgctgaactcttgcttttttgacctcaggcgatggtcgaggtgatgcctgcaaagatgattttgaccatgacagtgtgccagacatcgatgacatctgtcctgagaatgttgacatcagtgagaccgatttccgccgattccagatgattcctctggaccccaaagggacatcccaaaatgaccctaactgggttgtacgccatcagggtaaagaactcgtccagactgtcaactgtgatcctggactcgctgtaggtgagtagcgagttcttagatcctaagagactgatgcatacatggggaaaaacaaatataaaacctggcagttgtacctatccctgtgggtgctgaggatgtctaggaacatgatggagaaccttctgaaggctgcaggttttaacctggctctgggctcttcttccaggttatgatgagtttaatgctgtggacttcagtggcaccttcttcatcaacaccgaaagggacgatgactatgctggatttgtctttggctaccagtccagcagccgcttttatgttgtgatgtggaagcaagtcacccagtcctactgggacaccaaccccacgagggctcagggatactcgggcctttctgtgaaagttgtaaactccaccacagggcctggcgagcacctgcggaacgccctgtggcacacaggaaacacccctggccaggtaagaagcaaagccctggaacagagagagagcttatgggtgcctgactagcactggggatgctgtgctttgaccaagactctgaccagggagtcttagaaagttcccagcatcaccagctgcagcattgaactctgctttgtaaaaacataatagtgttgaaaagggagcttgaccaagaattgccctgcaaatcctaaggtgccttcagccttttcaaacaaaaaaacctccttccctcctctctgtctgctttatatgtgtgctcagtggcacacaacaaatatgagaggacttggaaaaattccccattgcagccctctaacttagatcagctcagtacctttcaagcattgtttctgatggaatgaaatagaaatctttacctgaaggagctgtgtttcaacctttccttttccttttccttcaggtgcgcaccctgtggcatgaccctcgtcacataggctggaaagatttcaccgcctacagatggcgtctcagccacaggccaaagacgggtttcattaggtacgatcatactgattcactttcacttacagtcacactgagggacaaaaagacaaaaagtattaaatagcattgtcactaaacaagattttttttccctgcagagtggtgatgtatgaagggaagaaaatcatggctgactcaggacccatctatgataaaacctatgctggtggtagactagggttgtttgtcttctctcaagaaatggtgttcttctctgacctgaaatacgaatgtagaggtaagagcaacatcaccatgaatgtacactggacatctctatttcagactaatatcaaggatgacggttatgggggagtccagtgtaaagactgttttggagacagggttatttctattttgcttttgaggacacaaggacaaaaatggaataatgcctaggcactgtggcttatgagttcctgagtccttagctataatattagtttgcttagcaatctctgtgctcctcatacacagtgcaaaggtaagctgcagaaaagctcctatataatttggacttcattaataatactgttctttacaattatatatttatatatcttactgcttattgttttatgcatgccatcacagcacgagttagcattcccaacttttccctgtatacaaagaagggagaggaatgttgctttcatattggcatgttaaattaatgttcactattaaacttagcattttttttcctcattcttttttacttagtcattacttaagctcgctgagtccaacactggctctaccacaaaataagtgcttaatatatatttactgggccaaggccagatacctaaaagatcaatgacagtagagaaagatggttgattttactcaaaaaaatctaaattattaatgtaatttttgagtccaaatttttaaaataagactccctaaactgttaacattgaaagcctttggaaagcataatatatgttctggaaggttcacgctgtgtcggtctcctagcatcaatgtcagctaataaaattaaatgctaatgtgcttgaacaaccttaaaattaggcttttgtcattagaaaagtagagctattcctatgtggttaacttattaactaagatgtctatgcttttatgaattagttttcatttgtatatttatttatatttgtttatttaacagatccctaatcatcaaattgttgattgaaagactgatcataaaccaatgctggtattgcaccttctggaactatgggcttgagaaaacccccaggatcacttctccttggcttccttcttttctgtgcttgcatcagtgtggactcctagaacgtgcgacctgcctcaagaaaatgcagttttcaaaaacagactcagcattcagcctccaatgaataagacatcttccaagcatataaacaattgctttggtttccttttgaaaaagcatctacttgcttcagttgggaaggtgcccattccactctgcctttgtcacagagcagggtgctattgtgaggccatctctgagcagtggactcaaaagcattttcaggcatgtcagagaagggaggactcactagaattagcaaacaaaaccaccctgacatcctccttcaggaacacggggagcagaggccaaagcactaaggggagggcgcatacccgagacgattgtatgaagaaaatatggaggaactgttacatgttcggtactaagtcattttcaggggattgaaagactattgctggatttcatgatgctgactggcgttagctgattaacccatgtaaataggcacttaaatagaagcaggaaagggagacaaagactggcttctggacttcctccctgatccccacccttactcatcacctgcagtggccagaattagggaatcagaatcaaaccagtgtaaggcagtgctggctgccattgcctggtcacattgaaattggtggcttcattctagatgtagcttgtgcagatgtagcaggaaaataggaaaacctaccatctcagtgagcaccagctgcctcccaaaggaggggcagccgtgcttatatttttatggttacaatggcacaaaattattatcaacctaactaaaacattccttttctcttttttcctgaattatcatggagttttctaattctctcttttggaatgtagattttttttaaatgctttacgatgtaaaatatttattttttacttattctggaagatctggctgaaggattattcatggaacaggaagaagcgtaaagactatccatgtcatctttgttgagagtcttcgtgactgtaagattgtaaatacagattatttattaactctgttctgcctggaaatttaggcttcatacggaaagtgtttgagagcaagtagttgacatttatcagcaaatctcttgcaagaacagcacaaggaaaatcagtctaataagctgctctgccccttgtgctcagagtggatgttatgggattctttttttctctgttttatcttttcaagtggaattagttggttatccatttgcaaatgttttaaattgcaaagaaagccatgaggtcttcaatactgttttaccccatcccttgtgcatatttccagggagaaggaaagcatatacacttttttctttcatttttccaaaagagaaaaaaatgacaaaaggtgaaacttacatacaaatattacctcatttgttgtgtgactgagtaaagaatttttggatcaagcggaaagagtttaagtgtctaacaaacttaaagctactgtagtacctaaaaagtcagtgttgtacatagcataaaaactctgcagagaagtattcccaataaggaaatagcattgaaatgttaaatacaatttctgaaagttatgttttttttctatcatctggtataccattgctttatttttataaattattttctcattgccattggaatagatatctcagattgtgtagatatgctatttaaataatttatcaggaaatactgcctgtagagttagtatttctatttttatataatgtttgcacactgaattgaagaattgttggttttttcttttttttgttttgtttttttttttttttttttttgcttttgacctcccatttttactatttgccaatacctttttctaggaatgtgcttttttttgtacacatttttatccattttacattctaaagcagtgtaagttgtatattactgtttcttatgtacaaggaacaacaataaatcatatggaaatttatatttatacttactgtatccatgcttatttgttctctactggctttatgtcatgaagtatatgcgtaaataccattcataaatcaatatagcatatacaaaaataaattacagtaagtcatagcaacattcacagtttgtatgtgattgagaaagactgagttgctcaggcctaggcttagaatttgctgcgtttgtggaataaaagaacaaaatgatacattagcctgccatatcaaaaacatataaaagagaaattatccctaagtcaagggcccccataagaataaaatttcttattaaggtcattagatgtcattgaatccttttcaaagtgcagtatgaaaacaaagggaaaaacactgaagcacacgcaactctcacagcgacattttctgacccacgaatgatgccttgggtgggcaacacgattgcatgttgtggagacacttcggaagtaaatgtggatgagggaggagctgtccttgcaatgttgagccaagcattacagatacctcctcttgaagaaggaataataagtttaatcaaaaaagaagactaaaaaatgtaaaatttggaaggaatccataaatgcgtgtgtgtctaaatacaaattatcatgtgaagaaaaggcccaagtgtaccaataagcagaccttgatttttggatgggctaattatgaatgtggaatactgaccagttaatttccagttttaatgaaaacagatcaaagaagaaattttatgagtaggttaaaggtctggctttgaggtctattaaacactagaaaggactggctgggtgagataaaatcttccttgttgattttcactctcattctataaatactcatctttctgagtagccatgatcacatacaaatgtaaattgccaaatcattttatagtaccaaggtgaagaagcaggaactagaaagtgttgataatagctgtggagttaggaaaactgatgtgaaggaaataattctttgaaatggcaaagaattaaataccatcattcattatcagaagagttcaacgtttgaagtgctgggagataattctaattcattcttggatagtgaagcaaaactgattgaaaataccaagataagacagaaaaagtgactggaaagaggagcttttcttccaggcatgttccagtttcaccctaagactgaccttcaaataatcaggttgtactgaaataaaggacttgttaaaaattaaaattatgtcatcgagatgatagcttttttcctcctccaacagtttattgtcatgtgttgtgggagagctcgagtgaagagcaataaactccaggtcttataagaatgtacatacaataaaggtggtgccagcagtttttttttttctaaagagtcacatgtagaaaagcctccagtattaagctcctgaattcattccttaaataaattggctctctctctcttctataatttctttttctttttatttttgagatgaagtcttgctctgtcgcccaggctggagtgcagtgacacaatctcggctcactgcaacctctgcctccccggttcaagcaattctccctcctgcctcagcctcccaagtagctgggactacaagcgcccgccaccaagcctggctaattctgtatttttagtaaagacggggtttcaccttgttccggacaaacactaagccctaaagggaaatccaaaataaaaacatctatttttaataacactttctatctaaatcagggtgactttttaaaaaaaatccggaagctttttgttgaattacgttacagacttagttaccagtccttgttagagttaccttcagttgacatgctgtgaatggtcccacctcttttatggcagaattcattacttaaaataactctattttcttcccccttacctaaataacagaaaggctcactatgtcccaaatatcattggcagaagcaaactataaagtcataagccctttgcagtgcaagtctagaaataatttt

SEQ ID NO: 149 - DNA, 17046 bp, Homo sapiens
gtggggtggggtggggctgggggcttgtcgccctttcaggctccaccctttgcggagattataaatagtcatgatcccagcgagacccagagatgctgtaatggtaagactttggatccttcctgaggacgtggagaaaacttgctgctgagaaggacattttgaaggttttgttggctgaaaaagctgtttctggaatcacccctagatctttcttgaagacttgaattagattacagcgatggggacacagaaggtaagaatgatataattactggttatttttgcttgtttgggatacactcagaaaggcaaatattaatggtaatctccttgttctattttctcctaagtcaccaagctatcttaaggccttttcatttcgtctctagcctgcactgctgccgcttcatcagttctctttgaatgtcatacagttctgttcaccttatcataggaaagtcacccggagaagttgtgtttgcttctcaggtttattttaggtaaccatatgccactgaggacgagatggttgagtgtttagaggatcgggctgcttggttgtatggattacaagtgtgggtctcagagccagtgtgaagacttctctggaagcattagaccttgaaaaggtctgtgtttggaggcacaggccagggtctggccatctgtttgtcctataacatatggggttcgtggatgctaaggagaaagaattccagttgtccttcctattagggttaaaatcgtgagtgcaggacatactaaaatattgagtgttgtatatgcattatttgcagggagaaaggcttttcttttttttctgattgagttttactcttgttgcccaggctggagtgcaatggagcgaccgcagctcaccacagcctccgcctcccgggttcaagcgattctcctgcctcagcctcctgagtagctgagattacaggcatgaaccaccgggcccggctaattttgtatttttagtagagacggggtttctctatgttggtcaggctggtctcgactcccgacctcaggcgatccgccggcctcggcctcccaaggtgctgagattacaggcatgagccactgcgcgcagcaagaaaggcattttttaccaagataaatttaactaaaaataaggggccaggtgtggtgggtcacacctataaccccagcatttgggaaaccaaggcaggaggatcacatgaggcctggagtttgagactagccttgggcaatatagtgagatcccatctctacaaagcagaaagaaagaaaatgtaggaaaataagaaagggatggaaaattatgagactaaagaagaaaaggctctcaaagatagtgaatgatgagaggagacagaagagatttttactaaacggaaaaagatttaacagagcattgcactggcagggccctccggggtaccgatgcttagctgggactgagacatctgggaggctgcaggcaaggtcacttctcctgctgaagctcccagcctgctgcctaatctgcccgacctgaaaggaaaggagtttaagatatgaaaggttgaagggattttgggtggtggggtgggggggaatggcgtagaagttggcctcaggtataaaaattgagctgccccaaggtagaaatggaaaatgtctcgcccggctgaattattccaggcaaggtgaagatgaccggttctccccactaagaaatgtctcttatatgttgggttcgcccttatatgttgggttcagagtaagtactttcttcccctgcgcgggagttagggatagcagaactgtatttaataaacgaagactgaaatggggccaggatgcagtgagtagatccagtaggttacatggtcctgagagataagagactcaaagagccacccagcagtgaagacacaaactaccaccccctccaccaccaccagtgggcttccgtggagtctggggtacagatcagactgcactgtatttgtttccagaatggtcaattcttagtaatcctacccgagactgtctttttctctgccctcccagttcgtgagtggaattctatgcctacatttgcctgatgcaagtttttaaatatttccaaactgaccaacccagtttctcttaacttcttccttccccaattttctttcatttttaccaagttaacttcacattcttatctccagataagttctttagtataatctattcctttgtcttccccattaattacctaaatctcattggatgttcttttcataccactcataactcaaattctcctaatacagctccataattaataagaaacagtcatcaatcacaagttttaaggactattctctcctctgtcttccctccctccaggtcaccccagctctgatatttgccatcacagttgctacaatcggctctttccaatttggctacaacactggggtcatcaatgctcctgagaaggtgagtgccaggccacaataattagaatttagaatagggaagttattcctttaagtagggtttcaggaattcagaatttaaggccaggcatggtggcatctgcctggagtcccagctactcctgaggctgaggcttaaagatcacttgagtccaggagttaaacaccatcctgagcaacacagttagtgagggtccctccccaaactaggggattttaagacaaactttgtatctatcctgtccaagactgaagatggagacaatattggtggggaaaattagtggggtcatctaatcgaagcacaaagctcacttactcccggaacgctgggcggtgctgttcttcctcccactctttcacctcatagtgatgcacatcctgtattatcccttaggggttagttacaaagaagctgggttcccttagcagagggctggggtagactgtgaacatcggtgctgccacctactgggattttcaggacaaatagaattactattccagcgagagttaacataaattccaatacgttatctgccccttccattcctgtctatttattcccttgattctctaggaaggaaatgatccctaatgtttgtcttttgttctcatccaactgtaacagtctgttcttccaccaacccttttattttgcagatcataaaggaatttatcaataaaactttgacggacaagggaaatgccccaccctctgaggtgctgctcacgtctctctggtccttgtctgtggccatattttccgtcgggggtatgatcggctccttttccgtcggactcttcgtcaaccgctttggcaggtattgactagaaactgggcaaggaagtgggctctaccagccacattgaggacaagtgtggagagttagggcagggaggtgatgatgcctttgaataagaacaccttgaattctaatcaagggaaacctagtccaactggccccgaatatgactgcccttgcttggagctctactaccctggagagctcccacccagctgtgcaagagatgaactgtgagtgattggcctttgcagtccagctagggatagttcagaattattccctagtaaactcaactatggggtttctagaaacatacttaatttacaaggtccgaagttgtttacttgtattataaatgtttttattattttacccaggattggtaggaattatttttgtctatggcaaatgtggataatgacaaaaaaaaagtcttattctatagaagcttaacaatatgttttagaaggtagaatatattttcatttatgactaatgaaggaactgttttaatttgccaattaggcacggtgtggtggctcacccctgtaatcctagcactttgggaaaccgaggcaagtggatcagctgaggtcaggagttcgagaccagcctggccaacatggcaaaaccctgtctctaccaaaaatacaaaaattagccgggcgtagtgacaggcacctataattccagctactccggaggctgaggcaggaaaatcacttgaacctgcagtgggggtgcagagggtgcagtaagctgagatctggccacttcacaccagcctgggcgaaagagcaaaaccccgtctcaaaaaaaaaaaagccggtgccgtggctcacgcctgtaatcccagcactttgggaggctgaggcgggcagataacaaggtcaggagatcgagaccatcctggctaacacggtgaaaccctgtccctactaaaaatacaaaaaattagccgggcgtggtggcatgcgcctgcaatcccagctgcttggaagctgaggcaggagaatctcttgagcctgggaggcgcaggttgcagtgagccgagatcctgccactgcactccagcctgggtgacagaccaagactccgtctccaaaaaaaaaaaaaaaaaatgccaattagatattctagaaatgcaattggaattcacatttaaaaatcggtaaagcaacctgttttacttgattatgttgttcttttgtttttttaccccccaagaaagagggtcttgctctgtcacccgggctggagtgtaatggcccaatcatagctcactacagcttcgacctccgacctcagctccctgagtgcctgggactacaggcgggcaccatcacacctggttcccaactagaaatgttctgataatagaaagtgaaaaacaaaagttagattaaaaaaaaaagggatgatatgagcctggagaagaacagaataatgaggacagaggagaagttaggagcctctcactttgctaattctactttgtctttgattaaccttacaggcgcaattcaatgctgattgtcaacctgttggctgtcactggtggctgctttatgggactgtgtaaagtagctaagtcggttgaaatgctgatcctgggtcgcttggttattggcctcttctgcggactctgcacaggttttgtgcccatgtacattggagagatctcgcctactgccctgcggggtgcctttggcactctcaaccagctgggcatcgttgttggaattctggtggcccaggtactctagaacttctcatacttaatgagtgttagtttcatgggtcattaaaaaagttaacataggtaaagcactgaagaatatctggcacatgttcaattacatatggaagttttagataatagatagtagctgaagaagcaggctgaggccgggcgctgtggctcacgcctgtaatcccagcactttgggaggccgaggtgggcagatcacgaggtcagcagatgaagaccagcctggctaacatggtgaaaccccatctctactaaaaacacaaaaaattggtcgggcgtggtagcgggcacctgtagtcccagctactccggaggctgaggcgggagaatggcgtgaacccggtaggcagagtttgcagtgagccgagattgtgccactgatctccagcctgggtgacagagcaagactccgtctcaaaaaaaaaaaaaaaaaaaaaaccatgctgagtagagaaaggaaaagaaacacaatttgtttattttttcacatggtaaaagaatgtatgattttctgaactttttgtgttttaatgaacttgtggcctgtgaagtatggggtttatagcattatctttgtgtggtttctagatctttggtctggaattcatccttgggtctgaagagctatggccgctgctactgggttttaccatccttcctgctatcctacaaagtgcagcccttccattttgccctgaaagtcccagatttttgctcattaacagaaaagaagaggagaatgctaagcagagtgagtatccttcacaccttactacatgaattatatggttgtggtttgttttagggatgattgtactggacctactttctgttacactctttccctgcctctcagaatccaagtgaggagggttctgattactcctgagtaaaattttcagcccctaaagaatgaggtgaaaaggcgggtttaggaatggatgctatcaggcagggtgtgatggctcatgcctgtaatccagcattataagaggccgaggcgggtcacctgaggtcaggagttcaagacctgcctgaaacaacatggagaaaccctgtctctactaaaaatacaaaattagccgggcatgggggcgcatgcctgtaatcccagctacttgggaggctgaggcaggagaatcgtgtgaacccgggaagtggaggttgcagggagctgagatcatgccattgcactccagcctgggcaacaaaagtgaaactctgtctcaaaaaaaaaaaaaggaatggatgctacccatcacctcacctcgtgcggccctttcctggctgccttacaggaagaatgaatttggggcagcacattctcttttatcctttcctctttcttcttttcaccagtcctccagcggttgtggggcacccaggatgtatcccaagacatccaggagatgaaagatgagagtgcaaggatgtcacaagaaaagcaagtcaccgtgctagagctctttagagtgtccagctaccgacagcccatcatcatttccattgtgctccagctctctcagcagctctctgggatcaatgctgtgagtgtgatactttagggtcaaacgtgtcttaaagtatttcacttaaaatgccgggcatggtggcggtgtgcctctgtagtcccagctactcaggaggctgaggtaagaggatcacttgagctcaggagtttcaggttgcagtgagctataattatgccactgcattccagcctgggagacagagtgagactgtgtctctgaaatttaaaaaaaggaaaaaaaaaaaagaccctggaaggacactggcaacttcagagtgaactgactttaccagtctgtttttacaactagtatagcgagcatggtagtttaaagagggcatgatagatgatagtttaaagagggcggcacaacggaagctagcatttggcaggtagcccttgtattccatgcaaatatcagcttcctgcatttgactgtggattgtaggaagagagtattcctgtgccttctagtcaatatggatattaagagcacccttgtcccacctttttaaatactgattcatcccctaagggttttcagatagtctttgatcaatgggattaaattattttgtaacaaagcattttgcaaaacttactattttgagcattttgatgctcaaaatagtaagttggttcttggaacttttctcctacctagcacaccaggatatttgtatttgaagtggcagtgcttcttatgaggggttagaggctgttatgtcagaatctatgaggagccaagtgtggtggctgctcatgcctgtagtcccagctactactcgggaggctgaggtgggaatatcacttaggcccaggagtcaagcctgggaaatatagtatgaccctgtctttaaaaaaaaaacttgggaggaaatacacagtagttagaaaaagcctcctaggtgattttgatgaatcccagtctcaaatttcttcatttggaaatgataatgtaggccacacgtattactggagaaaaatgtgctcccgagactttccagagcagcagagctgggactaggcaggtgaggcagctacgtgcaagtgtagccctgagaatgagcacctctttaaagaatgtaccttgcgttagttctgtgcctgtttaaaaaaagaaaaaagaaagaatgaaagaatgcacctgaggcaactccctagctgcctcaccacagtccaggccctgcaaaacaggatcagtaaaagatcacctgtgagaaatgacaagtgatccgtgagcagtctgagggacagactcctgccatttcagagtatggtgtgtacattctttttttttttgaaacagagtctcactcgatcgcccaggctggagtacagtggcacgatctcggctcactgcaacctccacctcctgggttcaagcgattctcctgcctcagcctcccgagtagctgggactacaggcgtgtgccaccatgcctggctaatttttgtatttttagtagagaacaggtttcaccatgttggccaggatggtctcgatctcttgacctcatgatccgcctgccacggccttcctaaatgctgggattataggcgtgagccactgcgcctggcccatcctttttttgaggtgaagtcttgttctgtcacccaggctggagtgctgtggcgcaatctcagctcaccacaacctccatctcctgggttcaaatgattctcctgcctcagactcccgagattacaggtgggattacagcccagattacaggtgcccaccaccataccttgcttattttttcgtatttttagtagagaatagagggatatcaccatgttggccaggctggtctcaaactcctgacctcaggtgatccacccacctcagctctctctcctaaagtgccggccttacaggtgtgacccacctcgcccggcatgtacattaattattgttggactaagctggctcccaatttagtcaatgagtagattttgcgctaggtataatctcacccaaagctggctgcatcagaattatgggggttgggattcctgagtcagctgaatttgagaatctctgtgtaagagacctgaaagttgtctgtaaaaaaataaatctgatgcacagcaggcttggaaatcacttttccaacctactttgcacaaatgatgatttctaatttcccttatgggcagatgggtaagaggttgcattgtatcatgtttacctagcagagtaaactatttaggtgagatgatgtaggggttaccttgcttggtgacactagatagcaaagtcattttactatgagaaattttattgagatgagtacatgtacattaggtttttgacgtgtagacattatgttaaggaaaagaattggcatacctatttattgcttgtttaaactgctcaagtaattacttttgcactagcctaatatatttccccacaagcttgacgccatcatataatatgttgagatttcttaacagtgttaattagccctagagcagcaggtttttcaataatgactctacaaatctcagtttcaaaacacaattatcttattttagaaaatatgaatatacatagtttacatcttacgtactagggatttaaagagttgtttcgtgagaaggtaaatcccaatgtagaggtccatattcataaaaaagactaataaatattgctatggaggcaaatactctgggtgaaataaactgaagtgaacctcggtaacctagataatgttcccttgttaacttgaggtctgagtccagtattttaatatctcttaactatggtagttatagcaactttagattttagcacagtgcctagcaaacaacataataatttatttaatatatattaaattgcattagtagctggtattatttcataaaacacttcaaaagggcctaggcctaggaaatacagcccaacctctgcttattcaatgagcaggataaggttattcaattagttcactatcaaattgagacatcgatgtccctatcaatgttttgagagtttggggaagagccaattaaaaaagcatttagctgggcctgatggcacatgcctataatcccagcaacttgggaggctgagaggcaggaggatcacttgagaccaagagtttaggaccagcctgggcaacagtgagttgctgtctcaacttataaaaaagaaaccagttagtaggaattacacctttatgtaagttagtgaagtggacataagcaagaggaaatggaacagtgggaataagcatttttagaagaaacaatgtaaatgagtagctagaattaagaacatttagagagagaaaggagggccaggtgcggtggctcatgcctgtaatcctagcactttgggaggccaaggcgagcaggtcacttgaggtcaggagtacgagaccagcctggccaacaaggtgaaaacccatctctacttaaactacaaaaattagctgcgtgtggttgcaggcacctgtagtccagctactcaggaggctgaggcaggagaatcgcttgaatctgggaggtggaggtagcagtgagctgagattgtgccactgcactcctgcctgggtgacagatccagactaggagataagatacagaagataattcatttgcagaagggatattagtattgaacgaaaacctagaaaaaggacttcttacccactgggacttttaagtttatttttgagggttctgtgtaactggtgtgcagaattgcatcaaagctgcatgttttcttttctcctaggtgttctattactcaacaggaatcttcaaggatgcaggtgttcaagagcccatctatgccaccatcggcgcgggtgtggttaatactatcttcactgtagtttctgtaagttggatggtttggtaattttgaggggagaaaagaatccttgctacagatgttcaaagatggattgcatgaccctaccatcatttagttacctttttgttgcttaattttcctttgggaaaaagagataaatttaatgttggatgtagtcttcactcttcaagcaaatatgggatggatgggaaaggagggagtatagaagggactatatagtatgctttgaacttggaattggaggaaaggtgcttggaaaaactctcaagctctgttactccactgtttttacactaaaacaacaataatcaacagaagttatctgtgatccccagaatatgtgagaatttttccccgtgaggtgtgcaatcagttccgtagtggacaccatctaggtgtcctgcgattttttaattatgacactgtctacctggagatagcatcagatctcacaggttggtggcccagttcccaagactgccccccactcctgatgccagtcacaagctccaggttgttttacctgtgcttctgactcaccagctgtagatcaggattcccacgacatcctctttgggtttgattaatttgctacagtggctcacaaaactcaggaaaattgtttcctagtttgatttaaaggatattttaaagcacagaaatacacaaccagatgaagagattcacggggcgaggtctggagggatcctgagcatgggagcttctgtctctgtggggttggggtgcactcctagcacatagatgagttgttgctgaccttcctgtcagcttccacgggttcagatatctggaagctccccataccctgccttttgggccttttatgcagacttaattggttctccatgattgaagcatggacaactgttctgacctgtgattggacaaaaagggaatgatctgaacccagctgggcctgtctgcttagatgatttgttggcctctctgtagcgtttcttcctctagggtgtggggcaggaccctctctgaaatgagggttttatgacccacagtcagattagcgtcctgccaagtgggagggcaggagaaagtcagagaagaattctgttatctgaggcctgctcctgaggcctgaagcatcccaacattatgacaaaagactctaccaagggctatggggattttgagccaggacctgtgaatggcacacaatatgtatgtatataaaatcataaatcacaggaggggtatccataacaagtgtcctgctgttggtaaggcagatttcaagtagctcagatgctgttttcatggaaaggaaaactgaagtttcatgtcatattcttcttccagctatttctggtggaaagggcaggaagaaggactctgcatatgataggccttggagggatggctttttgttccacgctcatgactgtttctttgttattaaaggtaggtgctctttgggtgaaaaaaaagggagggggaaagaagagaggttacagttgacttctgtgacacaaggggtgggttgttaaggttgcagtttgtcaataaagtcagaggagagaagcaggatgcccagagtttaagaaacatgggtcgtcagagaactggaggtaaactgttagaatccttacatttatagaacattattatagcttataaaataaattatctaatttaattcttagaataatatcaaggtaatcacacttaatagatgatgacatggtctcagtacaaagtgacatatatgagatcatatagatgggattgaaaaattcaatcctcagctgggcgcggtggctcacgcctgtaatcccagcacactgggagggtgaggcaggcggatcacctgatgtcgagagttcaagaccagcctgaccaacatggagaaaccccgtctctattaaaaatagaaaattagccaggagtggtggtgcatgcctctaatgtcagctacttgggaggctgaggcaggagaattgcttgaacccaggaggcagaggttgtggtaagttgagatggtgccattgcactccagcctgagcgacaagagcgaaactctctctcaaaaaaaaaaaaaaaaatccaatcctggctgggcgcagtggttcatgcctgtcatcacaacactttggaaggccaaggttagaggattgcttgagcccagaagttcaagaccagcctacgcaacatggcaagaaactttctctacaaaaaaacaaaaaaaaattttttttttgagacagggtttcactctgtcaccaggctggagagcagtggcaggatctcagctcactgcaacctctgcctcctgggcttaagtgtttctgctgcctcagcctcccaggtagctgggattataggcacgtgccaccacgctcagctaatttttgtacttcttagtagagactgtgtttcaccatgttagccaggctggtctccaactcttgacctcagataatccacctgccttggcgtgagccacagctcctggccaaaaaaaaaatttttttttaattaggcaggtgtggtggcacatgcttcaagtccaagcgatttgagaggctgaggtgggaggattgcttatgcccaggagatcgatgatgcagtgagctattgtagtgccactgccctccagcatgggcaacagagtaagaccctgtctcaaaaaataaaaataaaaataaatccaagccttttgactccacagccactctttgtattgtacgtcagggacaggaggagcttgccgttaattgcttctgggaacctagatactaggttacactgtctttaaatttaattttctctgttccttgctcttacaggataactataatgggatgagctttgtctgtattggggctatcttggtctttgtagccttctttgaaattggaccaggccccattccctggtttattgtggccgaactcttcagccagggcccccgcccagctgcgatggcagtggccggctgctccaactggacctccaacttcctagtcggattgctcttcccctccgctgctgtaagtaaactcaccttatcttaaaaccagcctatgtaagctgacatgaagatactccttaataatacagtagtctgggcctggcatggtggctcatgcctgtaatcctagcactgtgggaggctgaggcgggtggatcacctgaggtcaggagttcaagaccagcctggccaacatggtgaaattcaaaaattagctgggcatggtggtgcatgcctgtaattccagctacttgggagatcgaggaaggagaatcgcttaaacctgggaggtggaggttgcagcgagctgagatcgcgttactgcactctagcctgctcgatggaagcaagactccatccctaaataaataaaaaaatacagcagtccctcctcttcttcagtttcagttacctgtagtctaaaaatattaaatggaaaattgcagaaataaataattcataaagtttaatttgcggccagacacagtggctcaagcctgtaattccagcactttgagaggcctaggcgggtggataacttgaggtcaggagttggggaccaacctgactatcatggtgaaaccctgtttctacaataaatacaaaaattaggccgggtgtcgtggctcatgactgtaatcccagtgagcgagatcacaccattgcggtagcacacacctgtagtcctagctactcagaagactgaggcaagagaatcacttaaacccaggaggtgttcatggtgagctgtgatcaaccttctgctctccagcctgggtgacagagcgagattccgtctcaaaaaaaaaaaaattcataaatagagatggagttgcccaggttagtctcaaactgctgggttccagtgatcctcccaccttgacctcccaaagtgctgggattatgggcgtgagccaccgcactcggcccagaaacacagattttaaaaataatactcaaaagtccaaaaatactcagtagacatttggaagcatctaactgtaatgaaatggaatgacagaaagaaaactagagagaactacagtaagttagcaatggaatcataagcgaatctgaagaaacctgttttcattaaatatggaagggttatagcttgaagcctattggaaatatgaatgtgaaggaaattgactttgtcaatgaccagatttttatatcaaccttccttttttctgtcctttctctagcactatttaggagcctacgtttttattatcttcaccggcttcctcattaccttcttggcttttaccttcttcaaagtccctgagacccgtggcaggacttttgaggatatcacacgggcctttgaagggcaggcacacggtgcagatagatctggaaaggacggcgtcatggagatgaacagcatcgagcctgctaaggagaccaccaccaatgtctaagtcgtgcctccttccacctccctcccggcatgggaaagccacctctccctcaacaagggagagacctcatcaggatgaacccaggacgcttctgaatgctgctacttaattcctttctcatcccacgcactccatgagcaccccaaggctgcggtttgttggatcttcaatggctttttaaattttatttcctggacatcctcttctgcttaggagagaccgagtgaacctaccttcatttcaggagggattggccgcttggcacatgacaactttgccagcttttcctcccttgggttctgatattgccgcactaggggatataggagaggaaaagtaaggtgcagttcccccaacctcagacttaccaggaagcagatacatatgagtgtggaagccggagggtgtttatgtaagagcaccttcctcacttccatacagctctacgtggcaaattaacttgagttttatttattttatcctctggtttaattacataattttttttttttaactttaagtttcaggatacatgtgccgaatgtgcaggtttgttacataggtatatatatgccatgatggaaatatttatttttttaagcgtaattttgccaaataataaaaacagaaggaaattgagattagagggaggtgtttaaagagaggttatagagtagaagatttgatgctggagaggttaaggtgcaataagaatttagggagaaatgttgttcattattggagggtaaatgatgtggtgcctgaggtctgtacgttacctcttaacaatttctgtccttcagatggaaactctttaacttctcgtaaaagtcatatacctatataataaagctactgatttcctttggagcttttttctttaagataatagtttacatgtagtagtacttgaaatctaggattattaactaatatgggcattgtagttaatgatggttgatgggttctaattttggatggagtccagggaagagaaagtgatttctagaaagcctgttcccctcactggatgaaataactccttcttgtagtagtctcattacttttgaagtaatcccgccacctatctcgtgggagagccatccaaataagaaacctaaaataattggttcttggtagagattcattatttttccactttgttctttaggagattttaggtgttgattttctgttgtattttaactcatacctttaaaggaattccccaaagaatgtttatagcaaacttggaatttgtaacctcagctctgggagaggatttttttctgagcgattattatctaaagtgtgttgttgctttaggctcacggcacgcttgcgtatgtctgttaccatgtcactgtggtcctatgccgaatgccctcaggggacttgaatctttccaataaaccaggtttagacagtatgagtcaatgtgcagtgtagcccacacttgagaggatgaatgtatgtgcactgtcactttgctctgggtggaagtacgttattgttgacttattttctctgtgtttgttcctacagcccctttttcatatgttgctcagtctccctttcccttcttggtgcttacacatctcagaccctttagccaaacccttgtcagtgacagtattttggttcttagttctcactgttccctctgctcctggagcctttgaataaaaatgcacgtagctgaggccggatgcggtggctcacgcctgtaatcccagcactttgggaggcctaggcgggcggtcaggggttcgagaccagtctggccaacatcgtgaaaccctgtctctactaaaaatgcaaaaattagccgggcgtggtggcgggcgcctgtaatcccagctacttgggaagctgaggcgggagaatcatgtgaacccgggacgcaggggttgcagtgagcggagatcgcatcattgcactctagcctgggccacagggcgagactccgtctcaaaaaaaaaaaaatgcacatagctatcaagtgtgctttagcttgaaaaggtgaccttgcaacttcatgtcaacttctggctcctcaaacagtaggttggcagtaaggcagggtcccatttctcactgagaagattgtgaatatttccatatggattttctattgttactctggttctttgttttaaaataaaaattctgaatgtacacga

SEQ ID NO: 150 - DNA, 122203 bp, Homo sapiens
gtgcttgcggacttcccgccagcgccgagcggccggcttctcgggccaagtggggagcgagcgggagggcgggcaggtggccccgggccgccgcgcccgcgccttggctctgcccccgggagccgagcaagccgctgctccctcgtggtgtgagggcggtgatgtttttcctcccacccacttttgagttccccctcccccctcgcgcgcactctagctctcgccacaacctgccagccccagacctcggacgagagcgccccggggagctcggagcgcgtgcacgcgtggcagacggagaaggccagtgcccaggttagtgagcagtgcccggcgcccgcttccctcacctccttttccagcctttgcacaggtgggttgccttctcttggccggagccgtccctggaagtttccccagggtgccccaaattcccctgccaccccaacctgttctgtgctccagcagttagcaacctggatggaggtggggcccaaggcttctgaccaaagcaagttgggggtctctgaattcgaactcacagctcgtccctccccactcggcctgcatttctttatgctctggcgctttgagaggtcacttaggtactccaccctgagctacccaagggactctgcagtccccttaatcactgcctgtattcctgagcctgttttctcattttgctgatgaatacatggtaaagttaatgtagcagggtagatgggcgaaaggctccctatcctatcctctggccatctgcctcattttttgtccctgactacgggggtcagaatttgagacactaggctctggaagcaacgtggtatattgccagaacatagggcccggaaagcctgctttccagtccctcccagccctgccactaaagttatttgagttctctgggtccccccagtgcccattttgaaggtggagttgtgtggaatgaaatgaaatgatagaaaggtgttttgcaagccaaatgcgaggcattgtttgtcagtcataagcagcaatgaaagcatttcctccaacaagagataccctgggttaaaactgccattttcagtggcaacacaccaccagttaactgaacttttcttgctgggtggtagagtggggagaggatttcagctgatggacaagggcctgggactccagtgtctttcttattgtttgtcggaaagaaaattgctaccctaggggctgtcccacagatgatagtcaatgtgagattacaaggtcagtcaagcctctcaggaggattaaagagacactgtggggcgtgaagaactggctgacatgtgttcatcccttagccttcctgtggggatgtctctttgcttctgttctacccaggagacctgttctgaaagtgggctcctgacacttgatggcccagattgccttgcagtcacagctgggcaaggagcagttggtccctttgcttaacgcagatgaacaatgtgaatgcttgtttcatggaagcaccttaataaatacctttcttttggtacttgatacatttctctttctcttgtaaaacacaggaactctcccatcccacctccactacctgtgttagttgcagggttttgtttttttgttgttgttgttgctttcttgttgggtcctggatcccctgaagcatgtcaatggctacatgtctaagtaacctgtaaaagagccagtgcaagttcaatggcacaacagcctgtgtgaagcagacagagagttaatgcagaaataactccagttaactgggtcaaagtataatttgaaaaattaaggacagtttggctctttgcaagaataagagtcggctaagttcgctgagcaatgcttgctagtgtttactgctgcagtcccaacacatgttttgaaccacccccttccctaaaagaaaaagctgaagagataaagagaaattgaacagtgaggagatctggggagggaactcttcttggttcatatttctgcacagaatacaaaggcaggacttcaggatcttgtaaatcaaaagtgaatatttataaagcgattcattttctgatgttctccatcacagcctgggaggccacacagatgacaggaacgccaaaggagattaattgctctctagttaccaacttttttatttgctcataatattagttgggacctaagaaaggcaaaaaaatctatgagctgttttcttgccaacttgagttatgaagcaatgctacagttcaccgaatcgcccaaccattatacaagaaaagcagccctgttgattctcgcatggggagaccctaaaaccatggtttcagaaacacccgttgaaatccatatatgaatgtgataaattggatttcagtggttaaaaatctttctcttttggaggcttggggaataaacttattagaataggctcaggaagaacctcactgaggtgggtagctgtgttaaattgttaatgaaaatgatttgtttcgaataaacgtggtagccctcaagggacagtaacattctgagtgattgtaagtgggccacaaactcacagaggggaccaagacatcagaactcaggtctttagatgggtaggaacatgtcctgagagaatttggttctttaaggagcagggaggaggtaaagaaggaaggcagacggtgctgcaaatcttgtttgatagcacagattactctatcatcagttcttccttggttatgcattcataattgaaacagtggattttgaatgacccaggcaacttcatagcatttaagtaggagctgtagcatctacttcagagcccaaagatattcaactctccaaaatgatcgttttgcattccttcaagttctttatgtgcaatatttaggttggactttctggaaagatcaatgagttcatttcccattcagattgaatctggtgtttttagaacatttcaatattttcagatcacccattggaggaattttgcaaactctaacatctgtggaaatgatccgtgactagatgtgagctacagcaaactttctgtgttccaaggttcaaaaggtttaagatttctaccccttatactgggaatgccaatctcatgttttgaagaactgtagttgttttaatggtcttttgcatggtggtgcaaggtgaacaaattatctatttaatttgcccaatttcccctaaaaatggcccatttaaaatttccattttacaatggacttcttgggggaggaatatgttggaaccattttaagcagtaaaacttttcaggtgtttaattgcatccatttgctaattacatctatcttttgcaatattagttgccaaaccaaagatccttgtagatctcatagaggacacaggagaaactgatcaatttgtacttcattccaaaaggattaaaagtagtcttgaagctaagattagttaactttcatttcagaaattgcttggtctcatgcttgttacttttaccttgtttgctaaaataaccgtttttgcaagctaaagtttcccttttctcccaaaaaaatctcttgagaaatcaactttaattcccttagaaaggaagatttcaaaatttattttcattttcctataacttgcctgtaaggacttagcctcagctttggataggaatgcaccctcattcacttgaattttcacccacaagccttgcaagacaggagaggcaagtcctttatcttgtgcaggcagacaatacttacacttatgtaaattctaggacattttttttttattctagcaggttagaagcctgagcatcagtgacctctatcatttccagaagatctgtgttaagtcttttttctgctttcttcccaacagcttgaaggttctgtcaccttttgcagtggtccaaatgagaaaaaagtggaaaatgggaggcatgaaatacatcttttcgttgttgttctttcttttgctagaaggaggcaaaacagagcaagtaaaacgtaagtgtcttgcatttggaaaataatacactttttataatttctttgaaaatgtggctataatctgtagcaattatgatttagcccaaatgtggccgtgccattattctaagagaagaaagtgaatgttactggtttatgcatgaattgataaaagaatgagagctttgaatcaggccaactaaatttggggctgtttttctgattatcatgtagtctttgtctcatagaacatatgacacattagcttattttctcttccctgttctaaactatacaaatctcattacattttacgtaactctagaaatatctgacagatgagctggaattttcccaaatttcagactcttcagcaaaggctttcagtttatgaaaaataatgacacagaaaagaaaaaaaaagaaaaagaaaagcaggctctgcctattcccttatgccgaaaaacgaggaaggacgaaaccttcctatgaactgggctcagatgaaaaatgttttgaggaaattgagattccagggaccgttagcaaattggatgccatttattgaaaagaacatccccgcaaagccagggaatatttctagaaagtcagcgatccgtgtaatgggctaacacattggagaaagcagagagtggcaggaagtgggggcgggggggataattaaccctccttgctgccacgtttaggagatttatgagtaacggtcgacatatccgttcttgctgcctttgcacaatgtgggtcttaccttctttgggccacttgcagccatctctgaggtagatgcttgctctaaatttgaaggaaaagcctaagctctagttcccctttttgacagcatcaaaaaaagcacaaaatggaattggtccaagaggggcattctctgcttcactgaacttattcatgagaaggagctgtgaaaatattcttggtaggaactgaagcagcatctgaagcccttcacttaaacctttatctcttttatcacataagttaaatagatcaggcagaaggcttgctgacaaggagaacagtgccaagcctattccatccttaagtgtgtttctgtcccactacaattttcatagtaagtgtagtcttcttcctgggagaaacagtgtttaatagtgtttttgattatgcttttgagcatgagcggtgtatggtgatatctagtatgattgggacacaaaaggaagtttagtggggcatgatctcagcaaggaagcttggatcagcctctactcttgtatccctcaaattgcttccttcttcttccacttgaatatagttcatctcagaatcctcctcttccagaagccttccttgatttaagtggatgtgacagaagcatccatgcattctcagctcagctcacaattagctgggcttagggatgaaatattactcaataagtacaatgtacattatttgggtgatggttacacttaaagtccacactttatgcgatatatccatgtaacaaaactgcacctgtaccccttaaatttatacaaaaaaatcttcctgtcttagagagaaacttcccttatagcctgttaatgatgacctcatggggaaagcttgtaactctcagaagaccatctcttatggaaagcctttcatatttatgaagaattgaatattgtccatgaaacttagacaaagaaagatgtgacttaaaaaaattacaaacccaaatctactactttctaatatttccttgtgctgatgaatttgtcccaagcccttttgatattcaattggtgccaaagtgattatgtaacagatggcctagggcaccagatctggtccagtgtttcaggcttattgtcagatgatgacgctaaggtcatggtccttcccttagtgagccactgagcatcattatgtgtgtccatgcccaagctaactgttctgaagacatgcaaaatcatctctgctaaagggaaaacctcaaagcatatgtcctatatatgctgtcttgatatatgcatgcacatacacaaacacacacaatatgcatgcacagagatttatattgcagctctaacagtgagaagtcagaagcagtggaaatgtcagttcatagataaatagttacaaaaatgatccaggtaatgcaatataatgctactattaaaaacactgtttattgaaaatttggtggccctgggaaatgcttgttaacttatttttaagtttcttaaattataaaattaatatatatgcttattatacaaaacaacatgaaagcatctgagcttcatatggaacatgtgtccctaaactctcattccactctcctgggataaccattattagtggtttgctgtgtgatcttccaaactactttctttgttttataaaattatatatacatgcctgtatgatattttattttacaaaaataggatattatatacacttttctgtgatttgcttttgctcaataatgtgtgtaggacatccttccatgtcaatacattgcaatgtaatagtgccatattctttctaatgcttgcatggtttgcagttgcataagtttgcattggtttatttaaccagtctatatttgtagatattgaggttgtttccggtttttgctattaaaagtaagacatttatgaacatctttaggcacttattcaagtatttgtgagaaatagtcgaagtgcatgttcagttttaatcttcataagtactgtcaaattgcccttcatataagttgtattaatttatgctcccaccatctatgtatgaaagtccatttctaattccttcaccaagattataatcaatctttgtattttggggccattttaataggagaaataatctgtaagttttgcttggtatttttctctttctgcagcatcttttcgattatgtactagttcaattttatttcttcagtgaattgtctatttttagtttggttgcttgtgatatttatttgttaaaaacttacttattaaccttttatattttaaatattatttttgatatgccacttgttttaatctttaagttgtatttttcccatatagaagttttaaaattttacgtagtcagatctgtcattcattttctgtatggcttctggatttcttattcctaggaaggtctttctcaccctatatttttatattttcttctactgctgccataattttatgttttacccatagttctctattccatctgaaatttatattcctgtatggtatgcaatggggaactaattttttttaaatctccggatggtaggtttatgaatgttatttttgctcacttttatgcttctgtctattccaaaatttccacaattggcaagtttcacttttaaaacaggagaaaagctctttttaaagtaaaagtacatcttatttcccatatttttactgtgcaactctagagacaagttggtatgtgagtagatgaagaaacagaggggttttctaaaattaaaaaggaaagcaactggaaaaacttcagaaaatgggtaagagtaggcctgggtcataaacccttcacgtctctccttgtctgacaccattttaccaaaagaaggcaaagttttttatcttgcaggggctggttagaatataagcttttaggtcaaggaatgtgttttgtagcctgtttgctctcctatttggggcatcacaggggaatgacgggggatgccattatggtcaaagatgctcactcaattgattcagaaatctgaagaggtgtggaaaaaacgctttgtttgtggaaagctcatcacaaggaatggtgaagatgggtgctgccacttgctggtagctaattagccatagttacaatttctcttataagagagaagacaggctcaggaaacccgaaaatactgatagtgcattgcaatggatgaatgagccatttgttgcttacataaaagtttgttactgtttagcatcagcaaggtttgagttctttagctgggaaaaggtccttgtgtataactccattatgctctgttgttaaagttgtagtcaatgaggccaggaaactcttttgaagttcaaaggagcgtaacattcacagcataatattcatgcaaatatgggataaatgggctgaagagtttgcccatttggcagatctaacttaggtaatgaactattgatcaaagtgaggttgaagaattgaattgttaagaatattcaattatgtatttctaatagaccagcctgtgccaagtctggcaaaggttctggagagagaaattgttcatgtatttcatgcagtccactcctgctttacaaggtagttaactggatcttcaaggagctagattgtcacttatttttctcctcaagagaaaagcttccaatattcagatttggctaaaagtgggcctctggacttctcaggaaaggcaagccaccaaaagattgaagggaaggaagaagatacttagaaagtttgaaacatgtgaagcccacttagaacttctctattgtgagagccagccaggaaggcatgggttttcctcctccagattctcccttggtcatttgaggtgattattgagcaagcaaatgcgtggacctgttcacatcttagaagtttaattaagtggaattagacgaaaggaatacctaaaattagatagcttaatgcttttcaaagtatattcttaattgttttttattttggtgagggggcagtaggttttgtcatggaggctctgtagttagcctagatccaatccccagctccttgacttacttatgtaccttgggaatgttacctaacctctccagctttcgttttcttatcagtacagtgggggaaataatagcataatgagcgtgagcattgtcatttgaagaagaaacgagattgtgtacaccaagtgctttgcatagtggctggcacatagtaagtttttcataagtagttgctattagagcaactctcttacaagccaaagatattatccccttaattttaaggtgagaaacttgaaactcaatgaaatcaagtgactttgtacaaggacaagcagcaagtcccagccagagctagaaccaaaacccaggtctccgaattaagtgttctgttcactatacccatctgcctcttggaattctttgaggaagtcagttcattgtcttgaatagaagcccagtcctttatacatggcagccacttaacacataagagatgatccaagtaaatgaataaaaattttctaacccaaattcctaagagggatagtatactatttgggagttaaaagactgagacaaggactaaaaatttttcaggaacctacatttgctaagccaaaggaaagtagtgaggaaggttaaaagtatgtgcgtctatgtctatgcttcttatatttccctgacttctcagtaggattggaatgtcttcatagtttaatggaaagaggactgtgcttaaagtcaagagacctggtttccggtcagtcttcccttgtttgccgtgtggtattggttgaatcattcgtgttctatgaagtaaagattcactacttacaaattgaaaagaattcttgccttctggactgaaaactaaaggagaatagtataggggctggggaggtggaacaagggaaacgaaggccctggttttgtgtacttggagcaaaccacatggatatttaatattgtcacaaggtaattgcaaagaatattttatccatttaagatttatagcctgtctgcttctagaaaggttagatacacattagagatgaaagaataggggcaagataatgtttttaaagatgaaataaaatagagatcatctgaagaaaatagaaggaatagatgtttttaacatttggtttagtagattatagcatttataatgtaaatctggcttatgcctcccaaaaggatgaaaagagaaactttgggtttgttgtcaagagaaaatttacagtttcatctacagagattattcccacctctaacccactcaagcagtattgatcctgggatgtttgaataaggcacattctgggtaaccttggtttcatagaaaaaagaattgtctggcatttctttactgatgctttgtaaaggaagaaggcaaatattaaattataattcaataaaggactttctataagcagtaaggaaatgcattccaggtactttccctttgaatgatctaaattggagaatagaacatggaaatgttaaatagatgtttaatatgtctactagactggattgtcaactatcagatgccctaagcaagctttctattaacatgatttgtttctgattttaaaaatagatgctcattgttaaacattcaaaaggtacataaaagtatagggaaaacaaaaatgaacagtaatcacaacgtgtatggataaccatagttaattgatatatatatatacttgtagtctttttttctaagctcagttatacaaacatattagtttacaaaactgaagcactttttaaacagtatggatcagggtttgtttatttatttatataaacttaggggagacaagtgcggttttgttacaaggatattctgcatagtggcgaagtctgagcttttagtgtagccatcacccgaattgtgtacattgtatccaataggtaattcctcattccccatacttcttctaccctcccacctttccacatctcctgtgtctgtttttccaaaatgtatgtccatatatacacattatttagcttccacttgtaagtgagaacatgcagtatttggctttttgtttttgagttgtttcacttaagatcaattcacaattggagtctctaaaatgcacttgtagtaaagacaacatcccatgttgtctgtaagtgaaagctgggcggtttagacacgagttgcaggatatgcaaatttgattctattgtgagaagttcaagagctcaacttttattctctaccaaagggaacaaaagtattcctgatcaaacagaaagcctcccttcacagagatttgcaccgctaaagtgctgataggaagaacagtttggttttttgaacaggcatttttatttttgcccaaagttctatgccatatgacatggaagagatgatattagcctgaaaaaatattcaggtcaggtttcatcagcttagcagcctttctgtaaaaggatctcctcatggcctcatagtagacactaatgagaatatcatcaactcccagttatttatgctaatgaaagatagaagggcacaataaattgaaatttcatggaaaatctccagttctcatcttaatggtgtcaccttgcttgactgccaaacttctttgaattatggacccttttcttttcgatgggtttgcccacctgctaataggaaagtaaaataaccacaaaacaagtagtgagagggccatgctgtgggaggcccaggcaggtgaatcacgaggtcaggagttggagaccagcctggccaacatggtgaaaccccatccctactaaaaatacaaaaaatttaggtgggcgtagtggcgggtgcctgtaatctcagctactcgggaggctgaggcaggagaatcacttgaacccaggaggcggaggttgcagtgagccgagattgtgccactgcactccagcctgggtgacagagcaagactccatctcaaacaaaaaacactcagtatataattttgggcaggtgatccagcaagtaggaaaaagctaattaacttctgaatgaaggaaaaagctgcatacacaggacggagaatgttgcttcttcatgactttctttttttctctggcgtctgcaggctggaaatgaagtcttaaagtcctgagaaaacatgaaacagagtcttcaactctagaaacccaattgtcagtgaaataagaaacgttttccccttaactactacatcttgcccttcctacattctgcttcaagtttgataaatgacagaagagacgtacttatgcctttattttttcttcactcttctagtagccttttaaagaaaaaaataattaaaaaggaatttgtttacttgatgtgtccactcatataatgaatagcagagattcatctttttttccactgaccatgtgttataatagaataaatattattgtaatactgacatgacaatgtgtctacagtaatagcgcttatcaaaaacagttcttgggaatgttttcttgattttggactggtgatgaagttactgacctttgcctaatcctgggagctagtcagtaatgattggcaaaacattgatggcatagtgacacgtatctgttgttgtttactttttgtcatcattgttcctattaacaggggcccctaaagtagcagagatagccacctctaatgagggcaagctgatacatttgaaaaatagctgtgatgttgcaggttgaaggtccatctcacaagttagttggaattcctttgggaccaaattctactctcagacaccattagttagcagtaagtcatgcatctgatttgtgctttttgtccaagatgatatactgggattttatgtgttattgattatactgcataactcattaaattctctccttggtaatgtcaacaatttttaaaatttcaaacttataagcatatactgaaattggctttatcatagtttctcaaatttggtgattgtccaatgtgttcatggtgaaattagtataattgtgctaaccactcaatattggacaaccatgctcaaacacgtcttaaaaattatggtgttccagcacttttggaggtgaggtgggtggatcacctgaggttgggcacagtggcaggtgcctgtaaccccagctactcgggatgctgaggcaggagaatcccttgaacccaggaggcagaggttgcagtgagtcaagattgtgccattgcactccagcctggacaacaagagcaaatctccatctcaaaagaaaaaaaaattataatgtttacttttttgatatgctataaaaatatcagtgtcagtaattgcagaaacattgtttaatagcactaatggcgtgaccattcagctccttgtctgccttcagttcctaaatttgctccttccaggagttgtaggtttctgtctgggtcataattagccaaatcccatgttgctgagataataagaccaatacacttgatgaaataccattatgttttcattttagatcaggtttctatcagcagttagtgtttgagtaagatatttgcatcctcaagaagcatagtttggaagacactggtacgtgggataaatgccacgtgaacaaatgaggaaagtgctgttaggtttaaagagaatgaaaaataacttttagctggggtaatcttgtcttcccatcaagatttcaaagcccttaaaagcatgagcactattttatacattatgtgttgtcactgatgtaaatacaaaaatgcaaaatagtctctgccagctgcactattttatatagtctttgttgagtattacttgacttcactacaaacaacattgatttttaaaaggtgattaaagttgtgttaaaaaggtatagtggaaaggtaatttgagaaaaggttagtaaagaatatgtggaagctctttactttccaagttctaaaaacagtgacctgcaccttaccaactacgtagcaggagaggcagaattctgtaaaggttatagtctttggttctaaagctacaagatataggtttgaattctatttccataccttgattagtcatgtcaacttgggcaagttaccaaacctctctgtgccattgattcctcagtggtaaaatggggccaataatgagacctaccttgtagggttgttgtaagaatttagtgaattcagatatgtacaacccttagagcagatcctgcctcataggaaatgctcaacaaatataacttgttgtttttgttattgttatcaccgttctcatctggctctatatttttcttgcagttggttccctggctgctttttacacttatcatctacctcctagcctttgagctaaattcggggcagaaaattcagatggctcagctttcaaactttgtctaataatactccttagaggctgaatttgggggaaaatgtaatctattggctgaaatcagttagttgggttatctgtggttttcaagaataatggtgaactcacatatactgaagcgatccatttaatagtgtcagtgaaataatctatcttaaatattttttagagaatagatagcaacttgcctgaaagttatatattaagaataccttcctcatcacatcaatatatactgtccttttggaaacagactttcctgcaagtcagaatcttaaacagtttggaagagagttttagaaatgtgcaaatgaacttgaaacccacatttgtatagcttgttttatttcagtgcttgagtagtcttttcggtggtctttatcttttattatcccctttcttctttatcaagtaagaaaagggtaggtcattcaaccatgcagaacatatagctgataggaaaacatattcagtttcatattttaaataggtaaatattatgtcaacctctgattgagctaatctaagcaagaaaaataattcagaatcaaacacataatatacagttatagcttactctgcaatgtggatttaaacctacaaagtaacttttagcttacctccattcaagttttagtggccccagactcatataagtatgaatatttatgctaacctagtaatgccatttgaaggagccaccttgtaggatttgcttccacatgtatactcagattctttctgaaatgttgaaataagttgtatatgtgaaatgcaaatcacttaagtgtttgtcagtgagactatacatttattgtacagaaacagtaactctcatcccaccgaaatggtagagaaagatgccttatttagatgttagtcttgggaaattcataatcatctctcatcagttaaatatactgggattattaaaatatttaaaatatttcttaccatgtccttgaatgttgtggagcagaagtttaatttgtatctataccaaaaaaaaatgtattgctaagatttggctgaaaaacactaacattctgccttaaaagtatgttctgttttctttcaattaataaatattttgagcacctacttttagctcacaaatagagattaatataacaatgttgacgatgatagtatcataaaaggggaaataaaaattgttactaaaatgaatatatattcaaccttgccgataagaaaaagaaagaaatattggttccattttcccttacttaaccaagttgccaaaactttaaacagtccattgctgggcattctcactcactgctaatgggaaagtaaattactgtggcttttctggaaggttgtctggtaatgtaaatcaagaatttgaaagtactcaaaacatttgacccaagaaatctacttctaagattttgcattaagaaaatacctaatgttgcaaacagaactttatatgtaaggatctttgtcataatttatttaatggaaagaaatggaaacaacctaatatcccaagataggggattggttaataaattatggttcagctgtgtattggtgtagaactatgtaattagtcatgaggtatgggtaaactatttaatggcacaggaatgttctgatatgttaatttataatgtagtttataaaatgtatataatatatgctgttaattttgtaataaaaccttaatacacataacccatggaaaaaaaagatcagaaagagcttccagtttccagtctgataaatagtgatcttggaggttgtcattcctgttgtcaaaagaaaaaaaactgaatgaactgaaaatcaacaatagatgcagtaagatgggaaatggaaataaaaggtatacatattgggaaggaaaaaacagtattacctttgttcatagatgacatgtttttctgcatagaaaatcccaagggatcaacaacaatgacaaacacactcctgttactaataagtgattattgcaaggttgaagtatacaaagttaatataaaagtcaattgcttttctgtctaccagcaattaacaagtggaatttgaaataaaaaatacaatattatttatataagcagtcattaaaatgaaacaggtgtaaattcaacaaaatatgtacagtatctatatgatgaaagctataaaattctgatgaaagaaataaaaaactaagtagaatggagagatactccatgtttgtgtttaggaaaactcgatattgtcaagatatcagtttttcccaacttgatgaatagatgcaatacaatatcagtaaaatcccagcaagttattttgtggatgtcaacaaactgactctaaagtgtatatggtaaggcaaaacccagaacagccaacacaatattaaaggagaacaaactcactacccaacttcaagacttactattaagctatggtaatcaaagttatgagatattggcaaagtaatagaaaaatagatcaagggaatgtaatagagagcccagaaatagacccaaataaacatcatcaactgatctttaacaaagtaattcaatggagaaaaaatagtcttttgaataaatgggtgctggaacaactgggcatccatatccaaaatgtaaataaatctagacatagatttcacacccttcaccaacatttactcaaaatggaacacagacatgagtgtcaaatgcaaagctaaagaacccttagaggataatataagagaaaaatttaggtaaccttggatttggcaatgacttgcttttttaacttttagtttaggttcagggatacatgtgcaggtttgttaatacaggcaaatgtgtgtcacggggggttggtgtacagataattttgtccccaaatactaagcatagtactcaataggtattttatctgatcctctctctcctcccaccttcatgcctcgagtaggccctagtgtctgttgttatcctctttttgcccattggttctcattatttagctctcacttataagtcagaacatgcagtatttggttttgtgttcctgcattagtttgctaaggataatggccttcagctccatccatgttcttgcaaaggacatgacctcattcttttttatagccgcatagtattccatggtgtatatgtgcacattttatttatccagtctactgttgatggacatttagattgattctgtcttttgtattgtgaatagtgctgcagtgaacatatgcacacatgtgtctttatggtagagtgatttatattcctttgggtgtatacccaataatgggattgtttggtcaaatggaagttctgtttttaggtctttgaggaatcaccacactgctttccacaatggttgaactattttacatcctctccagcagtgtataaccttcccttttctccataacttgccagcatctgttattttttgactttttagtaatagccattctgatgggtgtgagatgatatctaatggtgagtttgatttgcatttctctaatgatcagtgatactgagcacattttcatgtgcttgttgactacatgcgtgtcttttgaaaagtgtctattcatgtcctttatctgctttttaatgaggttatttgttttttgcttataagtttgtttaagttccttacagattcttgatattagaccttcgtcagatgcatagtttgcaaatattttctcccattctgtaggctatctgtttactctgtggatgctttcttttgctgtgcagaagctctttagtttgattagattccacttgctaatttttatttttgttgcagttgcttctggcatctttgtaatgaaatctttgccagttcctttttctagaatggcatttcctaggttatcttccagggtttttatagttttaggttttacatttaagtctttaacccatcttgagttgactttttgtacatggtttaaggaaggggtctagtttcagtcttctgcatatggcgagccagttatcctaacactacgtattgaatagggattcctttctccattgcttgtttttgttgactttgtcgaagatcaaatggtctgtgacattatttctgggcttcttattctgttctgggcaattactttttagatacaacaccaaaggttctatccaagaaagaaagaattgataaatttgacttcatgaaaattaaaaatttctgctctgcaaatgacactgtcaagaaaataaaaagccacagactgggaaaaatatttgcaagagacatatctgataaaggactgttatccaaaatatacaaagaactcttcaaactcaacaataagaacacaaacagctctatttaaaaatggaccaaagaccttagcagacacctcacccaagaatgtatacagatggcaaataagcatatgaaaagatgctctacatcatatgtcatcagggaaatgcaaattaaaataagagtgagataccactacacacctattattatagaattgccaaaatccagaacactgacaacaccaaatgctggtgaggatgtggagcaacaggaattttcaatcattgctgatgagaatgcaaaatggtacagccactttggatgactgtttggaagtttcttacaaaactaaacatacttttaccgtatgatccagcagtttcactccttgatatttaacatcccaaattttaaaatgtatgtcccacaaaaacctgcacacagatgtttataacagttgtatttgtaattacgaaaacttggaagcagccaagatgtccttcagtaggtgaatggatgaataaacttcggtaaatgcaggcagtagaatattattcattgccaaaaagaaatgagctatcaagccatgaagaaacatggaggaaatgtaaatgcatattactaagtgaaagaagccaatctgaaaaggctacatactgtttgattccaactatatgacattctggaataggtaaaactatggagacaatgaagagatcggtggttgacaggggttagggaagagacaggaatgaataggcagaacacaaaatatttttagggcagtaaaattgctctctttgatactataatagtggatacatgtcattatatatttgtccaaacccacagaatgtgcaataccaagagtgaaccttaatgtgaattttggactttgagtgataatgatgtgtcagtgtagattcatcagtggaaacaattgtacctctctggcaggggatattgataactggggacactatgcatgtgtggcagtggtaacagggggtatatgggaaatctctgtaccttcctcccaattttactgtaaacataagactgctctaaaaaattaagtattaatttaacatataaaaatacataaatactttaaagtatttatataatactttccctccccccacagtttatgggtacatcaaatttctcttcagcaactgcaagcaaagaaagaaaggagtgaaatatttaagttgttgaaagaaaaaggctaccaatctggaattctgtatttagagaatttatttttcaaaaataaatgataagtaaagactttctcagacaaaaagtgagagaatttgtcaccagtagaccttccttgcaggaacttttaacaaaaattcttcataaaaagggctaccaatctggaattctgtattcagagaatttatctttcaaaaataaatgataaataaagactttctcagacaaaaattgagggaatttgtcaccagtagaccttccttgcaggaactattaacaaaaattcttcataaagaagaaaaatgacataggtcagaaacttggatctacataaagaaaggaagaacattagcaaaataataagtgaagtaaaatatttttctttttcttaattgacataataaaggacagtttgttcaaaataaaaatagcagtgatatcttacatgtctgtagcttatgggaaagtggaatgagtaacaggtgtaataaggaatggaagggagggattgggaaaattctgttagaacatatctgttctacacatgcagtggtatagtgttatctaaaagtaaaagtggacttggattaatgtaaatgtatattgtaaactctagggcagccactaaaaactttcttaaacgaagtataattgatatgctcagagaagagagaaaatggaataatataaaatgttcagttaaaaccagagaagacagaaaaagaaaggaagacaaaaaaaaaagtaacaaaaaaactagggcaatgaatagaaagtcattgcaaatacggtcaatattaaactagcaaatcaatagtcactttaaatgtgaatggtctatataaaccaattaaaagacagagactgtcaggggattaaaaatccccaaaatccaactatgtgttatctataagaaaccactttattttaaaaaatatttctaataagttctattgtgtacatttaaggtatacaacatgatgttatgagatacatataaaaattgtaactgtactgaaacaaattagtatatttattcatcttacatggttatccattttcccccacaagagcagttataatcatattaattgaacaatttgtcccttcaagtcaaattcctcagttgtgatgggtcagattcctcaattgtgaccaaccattgcaggtgaaattcaaattttatttttttagtggttttatttttgagaaaaattttatttcacctctcccaatggatagacatttatttcaagatacactgcatcctcttattgtcaacacttcaaacctaccagctactgacatcttgaaacagcataatttgttatccatgactcctgaaagttcctcatgtcaccaacccttatatgatacaaatgtaaagatggctattcgtggaaatgtgttcaccacattgccaagtgtcttgggtctccttttgaaaagaatgttttttcacaaaagtcaacatttccctgaaaatgcagctccatcttctattggtatggtctgtggaagtcacagagactgaaatttcggtccatattatggttgataactacaatttctgttgcaaagtatgcaagcattactttgaactgcatctgatgcaacttggtggtctaggccattacttgcaaattgccaaggcctattttgggaacaatgctttcaattcccttttattgcatgtatcagaacaatatcctgttaactaatatgatggttcattttactgcatatatgagaagaatgtcctgttaaccaatatattttgacttttggttttagtatgttttagtacaaatatccagggacaaattcttcagttgaatacatccaagagacaatttgttcaattgatctgctataatctaatcatttagcaaaaattctgactacaatacactatcattagctatggttctcatgctgcatattagatctttagacttgttcatcctatatatctgctgcattgtattttttgacctgtatctcccatttccacacccctacaccaatcatagtcaccactgttttattctgtatctctgtgaagttgacctttaaaaaaaaaaagataccacatataagtgggatcatgtgatatttttctttgtgtgtgtggcttatttcacttattgtaatgcataccaaagaatattttcagctatacaaaaggaagagatcctgtcattgccataagatggattgacttggaggacattatgctaaatgaaagaaacctagtttaaatataaagacacagatgggttaaaagtaaaggaatggaacaatatatactgtgctagctctaatcaagagaaagctggagttgttatattaatttcagacaaagaagactttaggacaaggaaaattatccgggaaaaatggggggcattacatattaataaaggggtatattctccaagaaaacataacagtccttaatgtgtttgcacttaacaaagcatcaaaatatgtgaggcaaaaactgatagaaatgcaaggagaaatacaaactattagagctggaggcttctatacccctttattagtaatttatagatccatcaggcagaaaatcagtaaggacatagttcaatttaatcatcagtcaactggatttaactgatgtctgtagaatactccatccaacaacatgagaatatacattcttctcaagatcacatggaacattcgccaaaatagaccatattctgggtcataaaacataccttaggaaacacaaaataatagaaatcatactatacttttttttttttttttttttttgaggcagtctcactgtcgcccagggtggagtgcagtggcgcgatctcggctcactgcaagctccacctcctgggttcacaccattctcctgcctcagcctccctagtagctgggactacaggcgcctgccaccacgcccagctaattttttgtgtttttagtagagacgggatttcaccgtgttagccaggatggtctagatctccttaactcgtgattcgcccgcctcggcctcccaaagtgctgggattacaggcgtgagccaccgtgcccggccctacaatatatacttctacaccatactggaattaaactagaaatcagtaacagaaagctgtacaattccaaactatttagagattaaaaaccacacttctaaatcgcacatgggtcaaagaagaagtctcaagagaaattttaaaatattttgagctaaaagaaaatggaaataccacttatcaaaatttgcaggctgcagcaaatgcagtgcttagaaggaaatatatagcaaggaattaatatattaaaagtggaaagatttaaactgaataatacagactaccaccctgggaagctagaaaaagaagagtaaatcaaatccaaactaatcaatagaaaataaattttaatggctacaaaaatacagttagatagaatgaataagatgtagtatttggtagcaaaatagagtgcttttatggattgtgacattggtcatttctaaactttttgcctaaaccagaatcacaaagatattctcctgtttgttcttttagaagttttaaaaaattaggttttaaagtctataacccatcttgagtttatttttatatatagtatgtgatatggattaaggttcattttagtttatgttttgtatattactatccaaatatttaggcagcatttgttgaaagtactatcccttttccattgaattccctttgcacctttgttgaaaatcaattgaccacatatgtgggtagattttgaatctattttattctgttgatctatttgtctaacatttcgccaacaccacattgtcttgaaaacgtcagtctgttgttgttctttttgcttttgagacagagtcttgctctatcgctcaggctggagtgcagtggcacaatcttggctcactgcaacctccgcctctcaggttcaaacgattctcgtgcctcagcctcctgagtagctatgattacaggcgtgtgccgccatgcctggctaatttttgtatttttagtagaaacagggtttcaccaggttggccaggctagtctcgaactccttgcctcaagcgatttgcctgcctcagcctcccaacgtgctgggattacaggcatgagccaccacacccggccaaaaagtgtaattttatattaagtctctgacatgtttcttttgcaaaattgttttggctattctactttctttgcctttccatataaatttttcattagattaccaatttttataaaagatcatgctggtaattcgatttagattgtatggaatctataaatcatattggagagaactgatatcttaacaattttgtatctttcaatccataaataaagtgtatctctccattttttaggccttcattgattttttcatcagcgttttttagctttctaagcgaagatcttacacatattttgttagatttatacttcagtattttcaagttttgggagagctattgaaaatagtacactttcaatattcaatttctaattgttcattataaaatatataaatatgatttataaattctctatagtaactttttaatatattcttatagattttctatgtagaaaattatgtctatttgtgaatagaaagttttatttttttactttccagcatataggccttttatttgttcttcttacccaatttcactgactaatatctccaggagtagtgaagcagacatccttgtataattcctgatcttaggggtaaagcagtctcttgccattaagtgtaatattagctataggttttttgtagatgccctttatcaggttgaggaagtactcattctagtttgcagagactgtctgtcatgaatggatgtagaattttgtcaaatgatttttctgcatctgtggcaatgattacatgattttccttctttggtttgttgatatggtgaattacattgattggattttgaatgttgaactagccttgaatttccaggataagccccacttgctcataaaagtattatctttctacatattgttagatttagtttgttaaaattttgttgagaatttttgcatctatgttcttaagggatatttgtctgtagtttctgttcttgtaatatctttatctggttttggtatcagtgtaaagcttgcattaaatattcagttgggaagtattccctcctcttcagttttctggaagggtttggtagaatgtttgatagaattcaccggtggagccatctgattctggaattttctttgtaagaaagttttcaactacaatttaaattcctttaaaatatataggactattcaggttagatatcttttttttttttttttgagacagagtcttgctctgttacccaggctggagtgcaatggtgccatctcagctcactgcaacctctacctcccatgttcaagtgattctcctgcctcagcctcccgagtatgggattataggcactcaccaccatgcctggctaatttttgtatttttaatagagacagggttttaccatgtaggccaggctggtcttgaactcctgacctcaggtgatccacccacttcggcctcccaaagtgctgggagtacaggtgtgagccaccacgcccagtctcaggttaattatctctttttgattgagctttggtaatgtgtgtctttcaaagaattaatccattttatgttgtttcaagaattaatcattctatgttgttaaactaactggcatacagttattcacattgttccctttttacccttacccttttaatgtctgtagtcaatgcaatgaaaccctcttttttgtctctagtcttagtagtttttgtcttctctctttttatctataggggtttatcaattttattgatcttcctaaagatccagttttgatctcattggtttttccttattgactttctgtcttcaatttcattgatttctgctctttattattctattttttttcttattttgtcctactttttctagtttaagatattgatttgagacttttctccttttccaatatagatatttagtgatacgaatttccttctaagtgcttttttagctgaatccctaaatgatgtgctgtgttttcatttagtacaaaatactttctaatttcctattgatttcttcttcaacccacagactatttatatgctaccagcttcttaaaagtggttatcttcctgtactgggattatgtataatgtttataaaataacactctatattttatagcactttataatttacaaagtgcttcatttaatcctctaacatccacttgagaaacataatatttcacagatgttgaaaaggttatcagggtttgagtgacttactcaatgtcacacagagtaggttaggactcaaacctagattttctgtctcccagtttattattctgaagaaattgtaaagaaaggtttgaaaaataaattggaattcaccttgtgggtatttggaaagattcatagaggttctttgaagcaatcattgatatgaggcatctctctcagtttagttttaatttagatttctgattactagtgaggttgaacatcttttaatatttattctctggtatcgtttggctatgtctccacccaaatccatcttgaattgtaactcccacaattaccacatgtcgtgggagaaacccggcgggaggtcagttatgggggcgggtctttcttgctctgttctaatgatagtgaatgagtcttacaagatctgatggttttaaaaaagggagtttccctgcacaagctctcttctcttgaatgctgccatgtgagatgtgcctttcaccttccaccatgattgtgagacctccccagccacatagaactataagtccaataaacctctttcttttgtaaattgcccagttgcaggtatgactttatcagcagcatgaaaatggactaatacgttgtctgttccaatttcttcttttctgacttgcctatttctgtacttagattgtttttctattggattggttggtcctaattgatttgcatgattaaaatattccaatactaatattttgtttactatttgttcacaatatcttctcttagcttcatgcttatctgtctttattacttcaattttgatcgtcaggaaaatctgcactggactgaagaaaatttgtgtgtttattataagaggagtattgctttattttgagctagtatgatgaaaagtgggagatagaagaggatgggattagaagataaaccacttgatttggaaattcaatttaccaatcatttgtcagttgcttatgcttgcatattgcctataattgcttattgcccacagtgtactaggccatgtgatgaatagagagtaaagaataaatgttacctactttcagggactctgatggagaaatatatcatgtacaataaggcagttaacatggtatgtgctcaagtgaactgtggtataagataagctgtggctaccaaaatttctgttccagcaaaggagagtgagtggtttgagttagttgggagttgtattagtcagggttctctagagggacagaactaataggatatatgtatacatgaaagggagtttattaaggagaactgactcacacgatcacaaggtgaagtcctgtaataggccgtttgcaagttgaggagcaaagaagccattagtggctcagtctgagccccaaaacctcaaaagtagggaagccaacagtgcagccttcagtatgtgactgaaggcccgagagcccctggcaaaccactggtataagtccaagtgtccaaaagccaaagaacttggagtctgatgttcgagggcaggaagcatccagcatggaagaaatatgaaggccagaagactcagcaagtcagcttcttccaccttcttctacctgctttttctggccttgctggcagcaaattggatggtgcccatccaaattgtgggtaggtcttcctctcccagtctactgactcaaatgttaatctcctctggccacatccaaaaacacccagagacacccagatacacccagataggatacacccagaaggatgctttgcatccttcaatccaatcaagttgacacttaatattaaccatcacaggagttgtttaagcaagaattctgtaagttgaatgggagcagggactttgtataaaaattttagttcttttcgtctgcaacacttagcatattgcctgacagtgctcaaatatttgttaaatgattgagtgatgttaacatgtgtaggcaaagccaatcatagagacctaacacaatgcatcatctatcattcctataccaccaacagctctgagaatgttctgatacatccacatttcagacattagcttgcatttccaaagaaagggaacacaaccttttcaagaaaaagaacacatgatatgctccctttatcattgtaacggagtagtagttaaaattttgtattgctgactatggccttatagtatagtttgaaatcaggtagcgtgatgcttccagatttgttctttttgcttagtcctgctttggctatgcaggctcttttttggttccatatgaattttagaattgttttttctaactctgtgaagaatgactgtggtattttgatggggattgtattgaatttgctgattgcttttgtcagtatggtcattttcacaatattaattctacctgtctatgaacatggggtgtgtttccatgtgtttgtgtcatctatgatgtctctcagcagtgtttttagttttccttgtaaaggtctttctactcctttgttagatgtattcctaagtattttattttattttattttattttattttattttattttattttattttattgcatcctttgtaaaaggggttgagttcttgatttgattctccacttgattgcttttggtgtatagaagagctactgatttgtgtacattaatcttgtatccagaaactttgctgaattcttttatcagttttaggagctttctggaagactccttatggttttcaaggtaaacgatcatattgtcagcaaactgggacagtttgacttcctctttactgatctggatggcctttatttctttctcttgtctgattgctctggctaggacttccattactttgttgaagaggagtggtgagagtgggcatccttgtcttgctccagttctcagagggaatgctttcaacttttccccattcagtattatgttagctgtgagtttgtcatagatggcttttattacattaaggtatgtcctttgtatgccgattttgctgagggttttaatcataaagggatactggattttatcgagtgctttttctgcatctattgagatgatcatgtgatttttgtttttaattctgtttatgtggtgtaccacatttattgacttacatatgttaaaccatccttgcatccctggtatgaaacctacttgatcgtggtggattgtctttttgataggttgttggattcagttagatagtattttgttaatgattttagcatctatgttcatcaaagatattggtctgtagtttccttttttggttgtggcctttcctggttttggtgttagggtgatgctggcttcatagaatgaattaaggagggttccttcttgctctgtcttatggagtagtgtcaaaaggattggtaccaattcttctttgaatgtctggcagaattctgctgtgaatccacctggtcctggacttttttttgttggtaatttttaaattaccatttcaatctctctgcttgttattggtttgttcagggtatctaattcttcttgatttaagctaggagggttgtatttttccaggaatttatccatctcttctaggtttcctagtttatgtgtgtaaaggtgttcatagtagtcttgaatgatctttcgtatttcagtatttgaagatactcctgttttgtttctcagtgaggttatttgaattttctctcttttcttggttaatcttgctaatggtctatcgattttatttatcttttcaaagaaccagctttttgtttcacttatcttttgtgtcttttttttgtttcaatttcatttagttctactctgatcttggttatttcctttcttctgctgggtttgggtttggtttgttcttgtttctctagttccttgaggtgtgaccttagattgtctatttgtgctctttcagacttttcgatgtaggtgtttagggttatgcactttcctcttagcactgccttagccttatcccagagattttgataaggttctgtcattattatcattcagtttgaagaatttttaaatttctatcttgattttgtttttcacccaatgctcattcgggagcaggttatttaatttccatttatttgtgtggttttgaaggttccttttggagttgatttccagttttattccactgtggtctgagagagtgcttgatacaatttcgattttcttaaatttattgaggcttgttttatgacctatcatatggtctattttgcagaaagttccatgctctgttgaatagaatgtgtattctgtggttgttggatgaaatattctatatatatcttgtaagtccatttgttccaaggtatagtttaaatccattgtttctttgttgactttgtgtcttgatgatctgtctagtgctgtcagtggaatattgaagtcccctactattactgtgttgctgtctatttcatttcttaggtctgttagtaattgttttataaatttgggatcatggtactggtataaaaataggcatatagaccaatggaacagaatagagaacccagaaataaacccaaatacttacagccaactgatcttcagcaaagcaaacaaaaacataaatgtgggggtccttttcaacaaatagtgctgggataactggcaagccacatgtaagagaatgaaactggatcctcgtctctcaccttatacaaaaatcaactcaagatggattaaggacttaaacctaagacctgaaactataaaaactctagaagataacattggaaaaacccttctagacatttactggggaaacatgccaccaatatttcaacgtaggttctttctattttccataaatgtcaaccggctaagaaataaagagaaagagtacaaagagaggaattttacagctgggccgctgggggtgaaatcacatatcggtaggatggtgatgcccacctgagccacaaaaccagcaagttttattaaggatttcaaaaggggagggggtgcaagaacagggagtaggtcacaagatcacatgcttcaaaggacaaaaaagagaacaaagatcacatgcttctgaggaaacaggacaagggcaaaatcagaaactcctgataagggtccaacaaagatcacaactcaaagggcaaaagcagaattactgataagggtctatgttcagcggtgcacttattgtcttgataaacatcttaaacaacagaaaacagggttcgagagcagagaaccagtgtgacctcaaatttcccagagcggggtttttccccaccctagtaagcctgagggtactgcaggagaccagggtgcatttcagtccttatctcaaccacataagacagacactcccagagcagccatttatagacctccccccaggaatgcattcctttcccagagtaatccttgctaggaaaataatttagagatatcttccctacttgcatgtccatttataggctctctgcaagaagaaaaatatggctctttttgcctgaccctacaggcagtcagacattatggtcgtcttcccttgttccctaaaattgctgttattctgttctttttcaagatgcactgatttcatattgttcaaacccacatgttttacagtcaatttgtacagttaacacaattatcatagtggcactgaggtgatgtacatccttagcttacgaagataacaggattaagagatcaaagtaagacaagtgtaagaaattatgaaagtattgtttgggaactggttaatgtccatgaaatcttcacaatttatgttcctctgccacggctccagccagtccctctgttcggggtccctgacttcccgcaacagacattggcttagacaaggatttcatgaccaaaaacccaaaagcaaatgcaataaaaacaaagataaatagctgtgacctaattaaactaaagagcttttgcatggcaaaaggaacagtcaacagagtaaacaaacaacccacagagtgggagaaaatcttcacaatctatacatctgacaaaggactaatatccagaatttacaatgaacaaatcagtaagaaaaaaaaatcctatcaaaaagtgggccaaggacatgaatagacaattctcaaaagaagatatacaaatgcccaacaaacatatgaaaaaatgatcaacatcactaaagatcagggaaatgcaaatcaaaaccagaatgcaataccaccttactccttcaagaatgaccataatcaaatgcaataccaccatactccttcaagaatgaccataatcaaaaaacgaaaaaacagtagatgttggtgtggatgcagggaatgtaaactagtacatccgctatggaaaacagtgtggagattccttaaataattaaaagtagaactaccatttgatccagaaatcccagtgttgggtatctatgcagaggaaaagaagtcattattcgaaaaagatacttgcacacgcatgtttatagcagcacaatgcacaattgcataattgtagaaccaacccaaatgcccatcaatcaatgagtggataaagaaacatatagataaatagatagatagatagagagacagagacagagagtcagtatgtgtgtgtatatatatatatatatatatgtttctattgattatatatatgtgtgtatatatatatgtgtgtgtgtatatatatgaatactactcagccacaaaaaggaatgaattaacagcatttgcaatgacctagatgagattggagactattattctaagtgaagtaactcagaaatggaaaccgaacatcgtatgatctcactgatatgtgggagctaagctatgaggatgtaaaggcataagaatgatacagtggactttgggcacttggggggaagagtgggagggggacaagagataaaagacaacaaatatggtgcagtgtatactgctagggtgatggatgcaccagggtctcacaaatcaccactaaagaacttactcatgtaaccaaataccacctgtaccccaataacttatggaaaaataaaattaaatttaaaaagattttgtacatcattgtcagacaaacctgggtttgagttccatctcagcttcttactggttatatgactcttgattttccttatctataaaatgagactaataataatatctaccttatgggtcattgtggtgaggatccagtgagcaaagtatgtataacactaatcccctaataggaattctataaatacttgctatgccacttctcttgatgtataataaaatggatggaacttgtgattgcttttgaattttgtgacttggttgatgtttcctaacaggcatattctccatctccttcttcacagattcagagacatattgcatgtttcaagacaagaagtacagagtgggtgagagatggcatccttacctggaaccttatgggttggtttactgcgtgaactgcatctgctcagaggtacaatctctcatgacatgtgatttcccagtttgctcctcagcatgccgagaggctttcagtgcccaaatggccagggaccatggatgataaaatccttaaagaaagtaaagaagcagaccgatcgcactgtctcacgcctataatcccagcactttgtgaggctgaggcatgtggatcacttcagcccgggagttctagaccagcatgggtaacatggcaaaaccccatctctacaaaaagtacaaaaattagctgggcatggtggcacatgcctgttgtctcagctagttgggaggctgaggtgggaggatcacttgagctggggacttctaggctgaagtgaaccgagattataccactgcactccagcatggttgacagaacaagaccctatctcataaaataaaagaagaaagtaagaagacgattgcaagaaaaataaacattttctgtcttctgtcctctcttgctttttggcttgattttcatgggttctctgaatatttactatggacagatatttatgatctcttagcctaatgatatagggcatggttagagaaggcagaagagcctgatagtgggagtggaggcaaaagctcaatagaatgtttagattgtaagacaaagtagtttttgaaaattattttaaggctgacctttagggagaatattaggacaaattataaactggttcattgggagagtggattctatgttgtctcagccaataactgtaattaagactgagtttgtgaaacgttggcctgtacctcttaaggattagagctcccttggcttagccttggctcttgtccagtcatttagaaaggattttggttggcataaatgccatctttgcaatagataaagcaggttgttccatcttcttcccatggtcttgacccaggagcacagctgtggtccatctttctcaacaaacctctgccattatatgttaggctagagtttcttgtttgcactatagatatttgtttgggggctgtcctgcgcattgtgggatgttaagcagtatccctggcctctacccattagacaacaagagcaccaaccccaatcctaataaccaaaaatgtctccagacatggccaagttgcctggggagcaaaaatcacccctggtagagaagtggtgcactaggctaattggaaagggaggccttgtactaggcattgagaattctgaacttacacaaagaattttcaagaccagcttcttacctgagaccttttgtaaggactgcacctcttccctcatgcccagctagagcaggaacaatcacttgcaagcctgatccatttaccatttgaacataattttgggctgtcagaattttgagcatgtggaaacataattatcaggtaacatcaggcagtattaagaggctatgaggttctagaataaagacagaccaagtttccagccctgcctctgccacttatgagccactggacaagttacctgacctctgtgatattcattcatcttcctctttttataaatgggataatgatattaccatttcatatggttctgataaggattaaatttacaaatccatttaaatcatttaaaacaatacttagtcttggtaaacattcaagaaatgttaacagctgttattgtcatcattgttgtccttatcattgtggttatcatcatcatcgttattattattaatctattagctctagaacagaattcagtatatagcattaatgaggattcactttagacctcagctgggaggtgtggtttctgatgtgcttcagtgatctcaattcaagattataccacctgcctctgaggagtgtgatacctgaggagcttctgtggtgttgccaaatgcaacactccaaaaaaaattattctagaaagtacacaagaaaaggaaaaggttgggataaggcaattccaatttggataaaagaagcccgcctctttaaatggttagggcatgtattaaatagatcatttggggattgattaactgcctgggatggcctgattttgtcggattcttgacgcgacacatttcgacacgttggagatggacagctaaccattgggagctgaggctttgatgtctgcaacgcagtcaaaatgttaaaatgatcccaatgccaacagctcaagcacaaggcattttctatttctatatcctcttcactactttcttcccccacaacagcctgacaaatacaagtagcccttgctgcaaatgatttatggatggaaaatgtaaatgaaaaatttatttccagactatgtctttgttctagaaatggttgtgagctgtcagagcgaggggtcttgtaattgtaaatcaggcagggacccagtcgccccacccaggcatactacctaatcagctaaattccaaactctagctcgtcctcagaagaattttggctaaaaaggaaatgagaagaatcacttggcccactgggccaaggcagatttatatggaatccaggatccacctgctagggatgcctccttgcccagggctgggtagcagctcaggggacccattgctcattgtgtctttcatgttattggacaggtgattatgaaatcagagtaggttcttggaaaagacatgcagctagagctggggaatggtagaaatgccatggagccaggccagaagaagcctcccacaattaatgggaagctttgaaaattggaggagtggtgatctcagccttagaaaaatatgccaataaactatcaaccaacccagcagaggtgctggtgatgagaaaaggaaagaaaatgttgaatgcattcagcttcttgggaatgcattattcactgcctgggtgagtccctgcatgactgtttcccaaactggcttgatcccagcgacctttgaaagacatttattttttctcattgccttctctttttcagaatgggaatgtgctttgcagccgagtcagatgtccaaatgttcattgcctttctcctgtgcatattcctcatctgtgctgccctcgctgcccaggtaaagcaatttgtctctttctttcctagctgtggttctccatttccctcttcacccaactcaactcatctccataattccccagaagggaaacttccagacagataacaataggaacctttaggcagtccaaactggcctctaaatactttttatagcccaaatggggtacattctaggctctaataagttattgggtacccagtaacagatttttattgggcttttaatcatttgaaggtgggtgtcaatcggagatggaaattgtggcccagagattttctgctataagcagcctcttcctgccatgggcagcaggcaccaggagagttgcagcatggcggcatgtgtcttatacaattagtgctggaattgcatccgagcatagcttctaaattatgagggggccattcataaatcaaaggagctgacccagtgaggtttatgacagtataaagctgcctgcctgctgaatagtcacctcctccagactgcagttattatgtacacattgttaagtgtaattctaaggggcagccaggcagagaatttttcacacaactgttaggacatctactttcacgatttgcagctacggtatttgtctgaggcaggggctccctcaatgacactttgttcatgtctgactggggcccgattcccaccccaaaagcgtgtggagtgattcagagaatgcctgtgggcccagtggcaatcctagaaaaagctacttgacactcttgggctttgtgaagtagaagccttatcatcctgtaagttgattccatttccctttagggtagaaattcttgaactagggttcctggatgggcttttgagggtcagagaaccctttaaaattgcttgcagtttttggtgtaactatgtatatttgtaaattcctttagagaacatccgcagctttattgtcagtcccaaaggggtgtacaggaagaaccactaccccagctaaggtatagacggtgctttttaagtggtgaggaacttccagaacttataagagagaaaccaaatgtatccaggcaaaaatgttaggaataaggctgggaatggggttcaatgaaaacccagtcaactgaaatgttccaagagtggagaatttttttttaatggagaagaaacacccaaactctttttgtcactacctttataaaatatattttcctgcatcagtaaatacaccctaatgaacacaggtgattcatttccagatggcagaatatcatgccatatcacaggtttttaaattctgagtgttggtgctgatagtatatgctttgagatgtcagagattgacttggcatatgaccaacctaaaagttgttgggttttttttggaataagtccctaagccaggcttactgtttctgtatgtgtttatttgcttcttcttcctaaactggattgcaagaatgtggtatgggtgggggtgggggcgctctggtaaatgggaacaatgtttctgataaagttgccactctggagagcttctttgttttttttttttttgtttttttgttttttgttttttgtttttgttttttggttaacctgccaggtagcctgtcagacagccttataaaagctttttattcctcagaagtctccaaaagtggtctaatgtcataggaacttatctaaacttctgtgtaaagattgttcttccctgggaagaaggttgaggcatgacccagacccagagcatggggcaaaacaacatagaatagaatatggctgcacctaccccagctgcctaacaggaagcaagtattgagaaaaagggaaagtataagctagcagttattttgagagaaaaataaagtgttaaaagaactgagctcaaaaattccagaggtgaaagcgttgaaagaaataaacaccattatggttaagacttaaaaagctcattttatggtatggaggatagaaataaactattccttttcttttccttcttgctcttgcagctcacttctccatgagttcatttttcttcttgttaactataacctttaacagctctttctgtgggtagtagttctaaaattccttagtccttatatacaaaaaagtgtatttattttacaaccattcttgaatgataatttggctgggtatgaaattataggtgcatgttcatctcccctcagcactttgaagatattactaaatggtttgttggctttatgtttgtttatttgtttgtggttaagaattctgctatttgtagttcttttgcgggttcttcgttttttttttcttctagcttttaaaactttcttcttttcattgatgcacacaatgagatgtgtaagtttgattattctcttcagcctgctcagcacatgattttttcagccaaaggagtcaaatttctcttcaatttttagtcagttttttttttgaaaattatctcttcaccttcttattttttctcattctcaaaattgtctttggtgtatattattgcatctcatttaatttatcctttatgtctcctaatgtctcctttatttttccctcctgatattctccctaaaatgatatattacttcaactctgttctccaattcatgaattctttccatgcatactatttaggccatgtgttgggttttgtttgtttctttgtttattttcaataaccttgtttcccctcaggttttcaagttatttaaaaagacatctacatgatgctaatttataacctgttattgttttggggaatcttattctcttttttacttctttaaagtatttaaaagtttatttgaagtccatttcagattgttcaaatatctaaatatttttagatgtgaattgtcacctttgttgggtttcttgacagcttttcttagttctgaattttccttggttttctactttttctttcaaagctcattatccatgggtgttttgggtttgttttgtttgtttgtttttgtttttgttttttcttacatgagcccttctttgtgggatggttgttgcaggctttatagttcactttgctctaaaccaggtcatatattaatgactcggtttgggctgcctcatgcctgaatggtctatttctacctctgttttcttgtgcactactagtctctgataatgatcatggactgatctacaactgcctcatctacaactgcctaacttggacaatcagtgttttttagggaacactgagtggggagagctatgtcagcccctgtttacatgcgagtagtgtgaccctagtccccaacttcacatgggaagccacttgcaagctgtagtttctcctcagccatttggatccaaactatccatattcagtcccagctgctgatggaccatatggctttggctcccatttattgctgtactttccttctatattttattccacgaagagtttttttgtgtttctgaatataattttgcagttttcacgttttatttatttatttttctagttccacatttcatctctctttgttttgaaaataacagggagatttctcatgtgttctctttgccatattgaaccagaatgcaaccagctattctttctttctactgaagataaaacaagagtaaatagctttaaatcatagcagagaggagtggagcttgacaaaaggaagaactttgaacaccgtggctgttaaatcctagaataaatgactaaggataattttagtctctttacttaatatttctagaaataaaaaggtacccacccatctgagatagagttggcacagtcctgctttgagacagggcaatggatgtgatgactcctctgtgttccttccaccccagtgattattaggcatgaggaaactcatgccttcagggccacagaaatgtttggtcaaagaaaagggctctggttttccatcttaacccaatggaaggcactgtgatgaaaatgtcctcatttaagaagaaaatatttaaagccaagatgatgaataagctccgtataaaaagacgacaaataagcaaactgtataccccagatactggctttacatactgtcctatagcagtattgatttagagaagcttttgcctaggtggtaacagactcagtggaagtgtcctacctatcatgcttagagcttagtttccattgaaggagacagaggagccatctcatttcatttgtttatgtatttcccatggctcttgctttctaaactcgttacccctaaaatttccaaggagcccacctgtatttgaaattgtctcctacagctcctgctaaaccgtggaaatcagagtatgcaggcagctcttccagaaataccagagagaaatctatactgattcccacaaagagcaaataaattttttttcatcagcacttgtccaagtcttggcagaggtcaagtcttagtcacataccacagtgctctactgggcccaaagaggctacatggaggctggaacattcttaatggaaaagtcaagactgcataggactcatgaacgtcattaaattcatcctggtctctaagcaagactctgtggagtccctgataattaagagattttagtgatttgaaggaattaaattccctatcttctcttttgggggaatgaagtggtaatgctggaagggaaagtaaaacaacatgacttattttcataatatgtgtatgtatatatttcataatatatatattttattttatatatatgcacagagagagaattttatcacaaaaagaagaattttatagtgatcaggagtctaaatcatgatattatctaagagggctttttaaaatggtcattccactgagaatttgctattcagaattaataaatttgggttttcctggaggtattccagcattcctgggttattaaagagctcttataaaattgccaaaataactgatttgatctggttaacagagacctaatccacagtgtttccttttggctaggtgtgaaaaagtttggcactatgaatggttttaataggaatagtgacagtgtggtttgccaagagagacaccccagtcttagatattcaaggtaggttagggaaaagaccttaccagtgttgcactatagtatgtgttcccataaggagaatgtgggaagccctgtgtcatttctctttcaacaatagttgggttgtgagtgagctagcaaacacaggcatttctgccacaatacaatatgcacatatctgaaaatcctcacattctacaaaattgtacactgaaaaatcacagggcttaaggaaaaagtagcattagagaaaaccactcaaaacttaggcaactttgtaaccagaatattaacaaagcaactatactaatgaaatactaacacagtttaaaaaggcatcttacatttctaataaaatattacagtaaatatagacttctagacttcaccttttaaaatggtaacattagcttgaaggaacagtgtttaaggaaggattgaagctgctaagttatagagacaacagtaaattgcacaaagatcacggagaatcatgtaataagcacttacaagacagagcatgtggcccaactgaggcaagaggaagaatgtagggcaaatggcttcctgatttcagttgagttagtgtacttggcttttagctgctgtcacttggtagtgcaaaatattaatttgctgggtaatcatgtatgaactaatgcaatttctattttataccaacttcattcccttatttagcactcacatatgaaccacttgtgttacacaaatccacactatagcacagactgtgtaagatgaggtgggtacatggcatttgactgtagacaagtttagagtaagagttgaaaatcacttgtttactctgaatctgcttttttttgtctttaatcactgacctatctgcccttgtgttccccttttctcccatcccatgtatttatattaaaaaggagtctagagtctaggtctatgactatgtctgtctatatctgtgacttccacagttacagtaatcaagtagacaggccttttgtgtttcctccagtttttttctagggaaggttcaaaagagagatttatttatttattattgtggtaaaagatgcataacataaaatgtatcattttagtgtataattcagtggcattaagaacatttacaatattgtacaagtggtaagaacatttaccactaatctagtttctgaaatttttcaccaccccaaaaggaaacctattacacagtcactctccattccccttttcccctagcccctggtaaccatgaatctacttctctatggatttgcctattctggacatttcacataagtggaatcatacaatttgtggccttttgcatctagtttcattcacttagcatagtgttttcaaggttcacccatgttgtagcatgtatcagtatgacatttctttttagggctgaataatcttccattattatgcatagaccactttcgttatccattcatctgttggtagtcatttgggttgtttccaccttttggccattgtgaataacgctgctacggacatttatatacaagtttttgtgtggcatatgttttcaattattttgtatatacctaggagtggaaattctgggtcttatggtaattttatttttaatttattgaggaatctctcttaaattttaaggttgccccatcttcttttagttcatttctttgagtacctactgccagccatcctcatggttgctgctgatttgctgcttttgccaccatccatatctgatctccattgctctcttctctcttctattctcttctgaattctatattcgtttgtctcttggattttatcaaaacagatcaattcctttttaacagtaacagccaattagcatattgttttccctagtaaggtgactacaatagctgtagtgtgcaagatgatcaaccaggagccactcctttgcctgcaaaagattggtatatatattacacataataattacatatatatatatatgggtccagagttatccaaaagcctgaggattctgaaatgttggtgtctgaatagcagatattttgctttattattattattactattttaggttacagaggggctgccaaaggagatgttcacttttgatcactagaccctccatgtccatactgactgttctcttagacccctttaaccatcttccatgccttatttccactatttttctcatactgttggtccttggacacttgacacagtacaaggggttaaaaccttcttcaagaaagtagcatttgctgggtgcactggctcacgcctgtaatcccagcactttgggaggccgaggcaggcagatcacgaagtcaagagattgagaccatcctggtcaacatggtgaaactctgtctctatttaaaatacaaaaaaattagctgggtgtggtggtgcatgcctgtagtcccagctactcagaaggctgaggcaggaggatcgcttgaacccaggaggtggaggttgcagtgagacaagatcgtgcctacccttcccagcctctagtaaccactattctactttctgtttctatgagatcaacttttttagcttccacatatgagtgagaacacacggtgtttatcttactgttcctgacttattttgcttaacttagtattttcaagtctcattcatgttgctgtgaatgacaggatttctttattttttatggctgaataatactccattgtgtatatataccacattttctttatccattcttccgttgatggaaacttacgttgattccatatcttgctgttgtgtgtggtcctgcgataaacatagggatgtagctatccctttaatacactgatttccctttttttggatatatacccagtagtaggattgctggatcatatagtagttttatttgtagcttttttaagaagcctccatactgttttccatagtagctgtactgatttacattcccaccaacagcatatgagttcccttttctccacatcctcactagaatctattacattttgtctttttgaacataaccattctaactgggctgagatgatacctcattgtggctttgatttgtatttttctgatgattagtgatgttgagcatttttatatacttgttgtctatttatatgacagagccttgatacattagtacccattatgaatctaccagagaggtatatgggatgtaacattgtctaaatttattcagccataatacccattttttggaggcactttgcagaattagggttctttgttatgtgcttcaagaagtgttgtattttgccattcaatttctaggagcaatgtatgttatagcaataagctattggtatatacagtatcttagtttggagaagtttgttagggtagtaggcaattttagcacaagaccctaaactagtactactcaaattttaacatgcttaaggatcaccttgggagatttgataaaatgcagactcccagaccctacaccaaaaatcctgaatcatttaggctgcagtgggtgtcatgcatttcacacaagcatcccagttaattctgatgcagtcggattgaggactgcactacagtaatagggcccaggggagattttgagaaaggaggtcaagagaactgcccacagaaagccgttctgggtaagatcttgcagcagtgggatctccagagggctgtgggcaacatgacaacattgtttcgctgataatggagcacatagacactctggaaacacattttccttgtgtgacatttccccaggactaaccctgcagtaacatgtgcacaatgtgccatctggcctgcccctctgctttcccagagctcccacccaaaggctgcctcttctgccatcttccacattcagagtccttggctgtcatgtccagaaagcaagaccctccgtggggagcttccccctctaccccgcccattgttcatgacttgttgttggcgagaaatgaatggcatttctcggaattagcccaggaatttctgctgataaacaaatgaaactctcaaagggaaaagcaatcaacatagtttgaaataaaatcagtgttttcagcttagtctgtttttaacttagtttgaaataagagtcacatctagggtattttaaggaaaggattagcaaaatgtcctgtagtgggcttttcatctgagttgccagactgacccttgaaccagggcctgttttcttcttgagtaagcagaagaggcaattattaccttgatttcctgtgacctgtgattctgagacctgtccagccatcggatcagctttgcccaagcccacccccacttccctgccaagttgcctgacacctgaaattgtcattacagcttaatcttttaaatttaggccttgtcctgataaattcaccaatctttgaaggtagtaaattaactcttattaatcatttttactttcgtctgaacacaggatttagaaagcagattttgattgtagaaagaggagacaggtgttgcggggggaagatcccgaggccactaagctcagctgggcacctgaagagttacaaagggagaggggcctgttgaaggaagggcctaaggagtcaagctttacctaccccaaagtcctgcagaacaccagtagtatttaggataagttctttatttgtagcagaggacacagtggtttctagaatgagttgccagctctcaagtttttcactttagtgttgttaatttaaaaccaatatgttctcaaagtaaccagatatccttgctatctgttgcctagagccaaagagttttacttcagggttttggacttaaaatgactgtaacccaaaaggtttgccagattatttgcagccactaagataagcaattgtctttattagaatgatttttgtctgatttttgtgtttagaattttataccatcagctattccctaaaagtgattttaggaactggcagacttagggtgtcagttattgaaatctgttccaaaatccgcctcctcacaggactccatttttggccatcaaagtagtctattttataaatgtcttgatgtgttgtcttttgtctttgccacatatactctaagacacagagactgggaagtggttcagcaaatatatgtatggctacttacaaagtgttttctagagttatgctcccagaattggagataggctaagaaatatatgtactgtatctctcagtaaagggctaaatcaaagctgtctgcaggagggggaggaagagggctgcttggattttagtttaattgagaagacagagaaatacgtcaaacttgggagttgaggttattttttggaacatgaagataatgtaagtgtccccacaagctctttttcttttcttcaataaattcatcctgttttgatttcttcacattcacaagattgtgccctcagggatctaaggccaaatcagagtccacactcactatcataccttttatataatatattcttttattattttaatagagaaatggatattgagaaggagaggacaaggaaatgtggcatgctttcttccttgttttctttctttgtttcccttctttccttccctcattccttcctttttattttcattctcttttttgtttaatttgtgattattttcttgtgctaaaaatccataacataaaatttaccattttaaccatttttatgtgtacagttcagtaacattaagtgcattcacactgttgcacaaccatctccaccatccatctccagaacattttcatctccccaaactgaatctctatacccattaaacactaactcctcactttctacttcctgtctctatgaatttgactactctcagtacctcatatgaatggcattatgccgtatttatccttttgtgatgggctttttttgcttagcataatgtctttaaggttcatccaggatgtagtgtgtctctttttcaaatggggaagagagagaagaaatttgagaagaggctggtggtagaaatgaggaagtgaagtcaggagacaaccaaagagtcttagaggaatctagcaaatgttgcttttcagaacacattttttctggaagactccagagaccacactgtctttgaaaatgacaggcctgacaagcagtaactagtattactgcctgtgtgaaatgctaggttttgaaagacgtgttccttattaatgttccccagggaacttcagagagtgtcatctattaggagctgattactggcaagttttgtcatctgcttttggagaaatccataggaatagaacagtacccctgtttctctttatctggagaagtacttttccaaaagggcctcttctgcgattgctttctgagggaaattgtgtctggagccattcaacatagctttattagaaagattattaaaggattagagtatgaaacctatgaggtgatgttgaaggaaaactgtaattactgaaactggtgaaagaaagacaggggccttcaccaagtttcagaaacataaatgggtcttagaggaggctgatcagctttctccttccacttccaaagggggagaaagagtagaagtgagcttcagtataaaaaacttaggcacaaaaaagtagttccaggcatagataagggaagctgaagtcattttacagtcaatatattatattaatagctcaggctcaatgctgagtaaacacaagacacacataaatgcacaaacgcatacaatatgattccattaatatcaagttcaaaatagggaaaagtaaactatattgattatggatgtgcataaatgtgataaaactacaatggaaagtgaagaaatgattatcacaatagtcagcatggtggtgagttgacctccattggggggtggtgcttctggggtgttggcaatgcactctttcttgatccacgtggtagtcacatgggtgtttgctttgaaagcatcagtacaactctacatttatgttgtacgtatgtaagttatatttcccagtataatataaagtgggattacattttcatttgttcttgatggttctgattggaggcaaaagtaccagaagaccttgcaagattacaaccaagcataggattctgtatgtgcatatggcaatttgggggactgttatatttgtctacttgtttgcattgttttggtcttcttgatgtttggttttgtgtgtgtgtgtgtgtgtgtgtgtgttttgttttgatttttttttttttggtttttggtttttgggtctttttgtcacaaagaatagcagtaccaaaacctagagaaaggtgtgctccttgtcctctaagtgggctcttggaattagtaagtaggcatttgaggcattgatttctaagctgtagagtgcacagtgtattggcatctggatgaagccatctggctccaggattttatcactgaccagagggccagagggcatgtttggcttccaggaagtcaggctggtcaggaacccctttgggaaggaagaagggctttggacctgtggagtatgcctgccttccctcaaagtgaggttttattgtgttatcatggggggaggaaggcagggggggccaataaagagatggggcctcgctctgctgtccttccagttcactgtgggacattcacagagctgattaacctctttgtacctattttctcagcttgtaaaatgagatgataattcctgccttctcttaaagtttgcattgacagtgaacaagaaagttgatatgggaaattgctttgaaaagtataaggaggtatatataatcaaggcagtgatcagcaatgaaaagaaggtatttaaatcctgggtccccagatttcatctgggcatatctcaatatgggcaaagcctgaaaccatagcattttggtacgtgttcctctagatcccaatgatagcagcctcataaccaggcattgaccatgtgtctccagcctcagggaaaagatgaggggagtctaaaggaaacaagtgacaggtttaatgactgtcaggcaaaaggcattaaattaatggcatcacctctgccttgcctttctatttccttctgattagattttcagaggtgcctgtgtgagtatgccgcacaataatgctgatgttctcaaagctgagtgagctcttaacagaaacataaggtagtgctgagaatgcactcagagacaaggtaaaaatctctagactgccttgagaaattgaaggggatttttctgggggagggctagaactgatacctcctccctcctaaatcataaaaagagagagcaagattcaccattatgtgttgattaggctgccttactcctgtttggttcctaccttctgctaatccgtggtcttgctagaggctgtcatctggcgcctcttgcaggagcacagtgtgtccgtactgcagggggcctctcagaccactgggatcagggaaatgagccattgctgtagtgttacttccaaaccagggaggatcagcacacacacacaccctttctgcccccaccaacttctccagggctttagaaatgtctgggaactgttttgttcgtcacagtaatgggaggatgtcattggcatttagtgggcagcaacaagagatgcaaaatgttccacaataagtaggaacacaacgcatggaagaagtgtcccacacaaaattccagtggtggctctattgagaaatactggacagcagccttagtcagagaagcctagtgaagggcgtctcttcctaaccagaagttggtggtatgagtccacacattcattaattcactcactcactcatattaatttcacaaacatttacagagtataagctttgagacatagcccatgtatggtgctgaggtttcagagttcctgcctcgacgagttcacaatctagtggaggagacacgcataacaagattattaaaatgtaatgtgatgagtactctggtagaagtgtggacaagggctgtgcaggcagagaggggagaagataggcactctccaagagccaggaatcaggcacagtcccagaggggagtggacatttgagctgggttctgacagatgaatggcactttgccagatgtagaagagggaggtggggagggcacgtgcagaggcatgtgtgggatccgtgactgcagttgagtatggtctgtgtaggagggaggaggctggaaatgtcagattgatggaggcccagtctcaaaggaccttgtacatcctgtgggtagacattattttgcagagccagcccactgcaaaagtagggaggaggtgcagtttgtctttagtgttcttggatgtctttttgcatcccctttcctctcttgcagtccctcatatcctcatctctctcccagccacttacaaaggcagctgatgagactccttccagcagaaaggtcaatgcttagcttaactgtaagaattcactaaggatagatttctggatgtcaaagggagagtctttgggcagagaacctggaagaactgagcactatggagatagggcagaggagctttgttcagtttacacacacttgatgtaagtgtaagtgtatgtaagcgtgtgggtgagcatgtatgttggagtgggtgacattgtgtggtatgtatgtgtgtgtgtgtgtgtgtgtgtgtgtgtgtgtgaatgagagagagggagaaatgggacaatgatagttcctatctcaaaggactgttgtgaggattaactgaattaaggtatctaaaggagttagcatagtgccctgcccatagtataccctcaataaatgcaaggtattgttggtattattttagaatgcagggccagaattcagtctggagaagggggaacatgcttactaccaagatggagatgaagattttacactaaggcttagtggctacgtctggctagtttcaaatatgtgcctaggacacattctatcactgggataatataatttttcagcatgttggcttatcagaatgtacatgttcccaagtggagccatagcattacactgtatatatttgggtactttctccatctctactcatggaacacatggcaggtagaaagctgttgttttacaaatgacgtggacctgtcttgaggcccagatcagctgatctgtcctcatgtatagcaacataaaatagaagaaccacagcactagggccagagccagggagatgcattagaaaggaattaacttgggaggatctgaattagggaacaaaagtactagccagagaaggaaggaagaagcaaaaagggggaaaaaaatcactaaaaggacaggatacataagatcatccagctgcccccaaactgaacttacaatgttttctgtgttctctttggaagaggagttggcttgtccagaattcaatggaaacttgttgattgacactgaattgggcacaagttcaatgtgagtgcgcctgcagctatttatttgattttttaaaaatgcaccctttgcagtaagactgtttagtttctactggcgccctggggcagtgagtttagattgttaaaatagcagccattaacactctctgtgttatgacactgtccttcctaccccactttagaggaatcaggcatgaggttgtttgacaaaagtttaattctcctctccccaccaaaagaaactgagattcctcctctgagtcagaggcacgtttgcccagccctaaccctgaaaacctccaagtctgcctacccgcctcaccaccatccccacaaacacacacacgtgactctcatgtacatctggaacacacacactttcacatacactctcacaggctcacacccacacccatcccacaagctagaggaaccctagggagcccttgtgcttgtcttgctgttcttttgttttgctttcctgtatttgctttgttttgatttgaaatcagtctttgggattacattggataattttttcatgttattaatagtgctgtgcagggagcatgtaaggacttcctcctcagtcctggccatgcttgcttccccaaatacaatgctgactctcattgatcaatcaaactgatctttgtcagactttgcatacaatacctcatgggcaaatagctcagggagctctaaaagatgcctgaattctgggattatctagattattcatgagtctgcttaaaaggaaattttttaaggcaggactggatagctatggctttcccaaaggccctggggaaaaatcaaaggagcagagacaatgtggaaagtgtggaactgctcagctcccagagcaaggcaataatctgaccaaacactaagcccccacccaaagtcagcattggtcaggctgaacagccatcatgagcacaagcctaggaggcatggaagggaagttctgtgttctctggacatctgtgatacatgttgtctataccagcactgtccaatagaactttttgcaatgatggaaacattctatatctgcactttccaatgtggcagccattagtataggtggctgttgaacatttgaaatgtgactggtgtgagactgagaagctgcattttaaattggatttaatgttaatcggtttaaatatgaatagacatatgtgactagtggttactgtggtgtatggcacagctttatcccattcgctggatacttctgtgcggcagtgaatttaattttgtacctcctctctgttcagtgtcttgcaactacatcataaactttttgagggcaggaatcatatattgtacaactacagaaagttataccttgaaaagatattttttttcagctgcctctccccatatttgacaaatagggagactgcgaaagactctgtaactttcttgaagtgacagcactcattagtaacattacctgagcctggaacccaggtctccttgcctcccggactgtgcttctaccacatctcccttgcagacaagttttcgaaagaggaagagttttcttcctctccactttcttcactgtttatatctgagattcagcccctgatacttggaaataatttggatctcaagtctacatttatctcctcatctgccaaggcacaaaataggctctggacaaatgtctgtggggtgaaaattctctgaggtctttctgttgtctgttatcttctatatttttaaagaaaatctttttctgcctcagtgtgtttgagacaaccattacttatgctgtttcagcccagggagatggggcctctgtagatgtggccctggcctgtgcaggtgctcaggtatacattagagaagcctgtgcaacagcctggcaggctgataaaaaagctgtagcagtttgggacctgggcccctctgtcttctaaattctctagacttgatggtagacaaggatgccatcagacatagcgccctcccttcaccacattttcatagtaacctagaactaaagatgcttcagggaggagtctagggccatatcttactggttactttagaaagtaagagaaaatacccagtagaaactaacctcagaatcacctgctaaaagaaagaataattcaacttgtaggtccaagtaaagtatcctttcatctctcttctcctttctctgttttccaccccaggcctttgccctcaacccagagccaacctatggtaacacagcaatagctgaattgaagcaaaacctgttaacagtcaccaaaggctgagtttcggccaagcagatagctcctccaggcagcccttcaaaagccaggcagaggcaagggggtaaatagcctgtggcctatctgcagtagaatggccagatggtttgctggtgccaccaaatgaaggagtgatctggtactaagatagaaggcttccagggaccctcccagccctaaaaatcttaagcccaagtgtagtcatcagatgccaaggacactggagaaagtctttggagcatgtagaacaccaagccaattggagtgcctgctaggacagcacaggattcctagaattccggccacaccatatacacccccacccccagagggcagccagtggccacagcagaggccttacccagcaggctgagaccctcatcagaccctccaagagcctacttccttacttagggcctgcctgcttgcactgtgctgagttcagggaggtggacaaactgtacctcccactttagcctaagaatctgacttgccatggactctccaggcagtgaatcattttgagcaagcacttaagcaactttccactgagtcattctgaggactgtcaggtttgctaatcctgatatatactgtgtataccctttgttcagatcctatacccatcctgatattggaggagaggggttataaacaacagaactttaaggatgtgctcattagaagtcatttgtattagggttccctttgccctactgactctaacagggcctgaagcactaagagaaatcctgctggtaccaacttttgatttgtgtatgcttttggttacatagctatcaagagtatgtactctttacctggagtggcagtgcacattggatttcttttccagaccctccatggatctgttttcctttggcttcttctagactaggggccagcatttctttttttctgtaaagggccaaatagtatatatgctagcattagcaggccttgaagtctctgctgtagcaactcttgcattgtaatgtgaaagcagtcataggcagtatgtaaataaatgggcatgaatatgttccaataaaactttatttacaaaaacaagttgcaggtcatatctggcctataacccctgttctagacacaataggctaagtcaaattagtagctgagacttagtttcagctgctagagtgcttaagcatatcacattggggaaaaaatcactcttatcctccattcttttggggaagagaggtagaaattgcaggaatattttcatctttcccattttgaatatcaaagcccattcctcatcaaatattacatactccatagtaatcagaattggctaaagtatgatgcagtagcaacctacaaagttcaggacttaaaacaacaaagatttatttcttactcatactacctctttgtcttaggttggtgcctgtcattatcaccaacagactctggctgacagtgccgcaccatcgggaatttagttccagcactatgggaagggaatataacacactgtggtctggctgtttaagacttttggccaggagtgatacagattacttctgctcatctggcattggccagagcaagtcacactaccatgacttgacttctacaggacagggaaatgcaatactaccatgtgcctggaaggaggagaatttgaatattgatggaaagccctaatgacaatcacacactctaagaactccttttcagtttcttcttcatgtcattccttgcctacctttaggttatctggcctagttgtatcttttgtccaaccctacctggccttcctcagacatgctggtcattgacattgatacatgggggagggacaacttagggactaaagcattgggacagtaattattccctaaaatgctgtgtagaccagcatgaacatgaagtcaggcctcagagccaggtcttacatgccgttggatccaagggttgattgccattgggcagcaagcctgagaaaaattggacctcccataactctggttttgatttcactttagtttacttttaatgagaatttgaatcagagaggaagttctaagcatattgactttaggcagtgccttcccttagtgctatggagagcagttatcaagagggaagaggaatatggaatgtgaaaggtagaaagtataggtgatattaatgcagtattatgggctaaagtgaaacatatggcccatgattttagaagaaggaatatatctgcaaagacaaaataattagttgggataagcccattgctctaacaatccccaaatcttagtgactaaagacaatgaatgtgggagtggaggggcctatggagagggagggcttttgctccatgcagtcattcagggacccaggcccctttcactctagtggtctttctttcctctagagtctcacagttcatcactggagcctctggtatgtggtccttagtttagggaaaagaaagcaaggagagttttgcaggacgttttataggtcagtcttctaaggcatgtttatcatttcttcccacattcaattgactggaactcattcacatggctccacctaactgcaggcgagactatggaatgtagtgtagctgggtgccaggagtggaggatggagatgggtttaatgagcacacaacattgtgtattccgctgcatacttgtcttgagcaagggtgattttttgtaggaagggttcagtctgactgagtcttaactgaagtcttcatcaacatactctcaatattgaaatgttttccccttacagagcactgtcggccttggttgaacagaagactagtcctgactgcagaggccttagataaatgcaattttgccagtccttacattttacttcataattcacatggcctctggacagatatgtaagagcacttgcattctcattggtacaggtttgggatatgtatcctggggcaggaacgtgaaatagatgacattcaatggtatcgtgagcaatgatcctaggaaattcattctgaatcctaaactgggcgtaaaccattcttaaaaagtaaaaggaaaccattaaaattggaactacataactaatctttgttccatttttggcctggctaccagggcattcagagtcctttaacacactcacatagaatacatagaataattatgttaatcctattcattgtttttttttttttttgaaggagtctcactctgtcacccaggctggagtgtagtggcgcagtgtcggctcactacaagctccacctcccgggttcacgccattctcctgcctcagcctcccacgtagctgggactacaggcgcccgccaccacgccgagctaattttttgtatttttaggagagatggggtttcaccgtgttagccaggatggtctcgatctcttgaccttgtgatccacccgcctcagcctcccaaagtgctgggattacaggtgtggtatttcttatagctacttctcggttcaggtgttttctattttcaattacttcatgatatatgttgtttgttgagaacaggagaaaaaaataaggcatggcttcttcttgttttatttaggctcggtttgaagactggcatttgtgaaaaagatttttctgtgtctatcgtgacttcctgagcagttggttttatatggtgtagttttggagatgaacttcagctgaaagaaaggctcaactctaagtttgatgtgagccaaaggagtgcatcacctcttcaaggacagctagatctttgctgtctaatctaaagctgttcaccagaatggagaaagcacttttatgttccttttctccctagctatatttcaaacatttagggattagatgatttgtatctattattttttctagtccagagcttcgcaaacactttggggccagataattctttgtcatatcgtctatcctgtgcattgtgggatgtttagcagcttctctgacctctacccactagatgccagagtacccttctcaactcgtgacaaccaaaaatgtctccagacattgccaaatgtcccctggggaaaagttggccccagttgagaactactgtagttgtaaatttttttttaattgggggtagataccctcactttcccagaatcctgttctgtatttgacatttcttgcagagatgggagttggaaacaaaggttatggatgtcagggagctcagttctaagattgcctgcatttatacctccctggggtgtggactcaggccatatggaacaaatatgacatatgtttgtccagtacgggcagtaaaaaggcttctcaatactcattaacctttgagaagctgacttgtttctacagcattattgaaggttctgaataagatgaactcttagaatctgaatcactgggaatcttcctgaagtgcagatgatgtttcagtaggtctggagtgtgggtgtgagattctgcatttctaactagctctcaggtggtattaatgctgctggttcccataccacactttgagtagagggttggtggtctctggagaagaggagctggctaactagacactatttttaggttctgcagaaggaattgttctttccaagattattccattggcccagtaagtagtgaagtaatctgcagttcttaaacattccctccttctcctctcaagaaggtacaacccacagtgatagtctccctgctctctctttcattctctgcagccatttaaggctaatatgaggtaagctagtcaagtacttccttttgattagctaccttatattttttggaccttctgtgtgtccgtgtgtaagagagagagtagtttcctttccagaggaaatagtggggataacttcggaaaagccattacagtgtcagaaataggtggctattttatcctagctggagtttcagataatggaaaatccatctctagaacaatgtagtatagctccacttctgggatcacttctggttggccacttcctagcctttgtttcctcatctataattgtagataatagcaataatcaccttagagggtggacatagggagaaaagaactaatgaatatcaacctgaagccctgagcacagaaccagctcagtgtaagcatgagccagtaaatattagttcctaatcttattggtgtggttattgtcattattggaactgggatcctcagactctttttgcctctaaattgtttgcatatattgtactcctatcagtgacatctttcatcatgtgcagtgattctcaatcagggatgaggtggtatgtggagtttgaaaccactcccaccagacaccatggtctccttgttcctcttttgagggttattggtctaagcaatgactgaatctcatattgtttttccagccttggtaagtccaaagatgataatataccttatttatttgtttgatctctgacccctatcatcacttttcactctaatcactttaatatgagcatctggctgccaaaagaagcccagtttcaaactggaaatttttattaatatttgacatatttttacttttcacacctttctttcctaaggaattgtcaccatcccatggcaatcaatggtggagttctttagaatccagatttcctaacaccttccctttcctttctgtgtattgtgtagtcttaactaaataactctccccacatcaggaattttggtctgggttcttaaagaatttcctaggagaagcaaaatgatactttgtcttttcctctagtagttccatgacatggcagatgagctgcctccttggtcgtcaggaagaggtagactggattttcctaacagcgttcccactgctccagcagcctggagccttgtgtgccaccactttccttgcaccctctgccagtggcctccagggaccactttctgaagccagctgctaacagttttccaaacaaaataatatgtgcattgggggataacttttctcaattaatcttcaagtaccaaatgcctcttttcttcctttatgcctaatgtgatagcaatgggctctttcagtcacctcctgacatatcctgtccccgagctcattatctcttttccagtcatctcagaatagtttttcaaaaatgtaaatctcatcaaatcatttcactacttaaataacttccctggcttctcatcatatacaggaaaaataccaccccctggacttgacttctttgtgtctccaggtgcctgatgtcattgggctgttgttgcaagtggttctggttattagcactatacagtatttcacaggggagcattttctcttgatttatagggcttgctaatgaaagaaaagatactggagatgctatcagccatctaggagtaacgtgttaggtcttagctgaaggttgagtgtgactgaagttgggagtgcggttctggattcagcagataatagtgtccatgagatggcgaatatccagatcctcaaaatatctaggttttgatgtggtgcagggcagtgctttccaaggagtgtttctggggcattcatagttgttacctaggtgaaaaaaagagtctggtggataagtaaagtcagagaaaatgctgagttatcattaaacaggtttctttactatgggacttgtgagatccttttaacatattgaaagggacactgaatgttgaatgtggatcttttcccaactttatttaagcacagaattttgttttcacagagcatcttgtggactagtagtgctctgcagagcagacttgggaaatgctggtgtaggcaatacaaaggaatgcttgactgaactccccactgtctcatccagatgcctcacattgtttctgtaaatgctgcttgagggtaatgactaatttgtccatttcaaagggtcattgaccttcaaaaaaaaatctagttctcaaaggattagaactaaccaagtaatagtagaactcattcttaatttattcagggagaagaggaaggcagtgagtgacaacattaccacataacctgttattaacaatgaggcatcgtgaagaatcattgatttaacattacacctcctggtaattagaggtttttaaaacccatagtacagtagcaaaggaataatacaaatctatcagattcaccatggaagggattctttttgttgggctacataatccaagttcacatgaagatttgaggttgaggaattagcctctgaaaacagagggatttgtgttttatcttccgcaattattagactggattttagtgggcttctctagccctcacgttttgctgctctaggtaaaatgaagagacctaaatttgaatctttgctttggcactaaatagcagtgtccccttggcatctctgggcctcatttccacctgtcaaaagagaaggccatttccagtttcctcttggagatagaaccctaggaggcttatgtaatgagattggaatggtccatgagctgaataatggagctgatgataaagctgttcagtaaagtggaagaagaaattttgacaggaaagaacatagaggttgcctctgaagactggattatgagaaacttccacaagtaagtactctcagcacacagaaagctgaaaacaagtgtgcataaccttagagccacagaatctggacagagttgtttgcagagatctcatactgctgaagtgaaatcctcagcccccctgctttgtatggcaatagagagggtacttcttttgggtcatgaaatcctgagaatctgattgaacccacagacccttttcccagaagaaatcgattctgtaactcacttctgaatcacttttgaaaatcatacttatttctctccagctatctgcccttaaatgaagaatcaccttgcctctagatatgcatatttatatgttaatgaaattaataccagactcttaaaattagcatgtatcactatttgaatatttgttccttcttgccatgctctgttccttttttttttttttttttttttttttgagacagagttttgctcttgttgcccaggctgtgcgatctacagcacaggctgtgcactgcagcagtgcaatctcggctcaatgcaacctccgcctcctgggctcaaccaatgatcctgccttagcctcctgactagctgggattacaggcacctgccactacaccaggctaatttttatatttttagtagagacagggtttcaccatgttggccaggctggtctcgaactcctgacctcaggtgatccacccacctcagcctcccaaagtgctgggattacagtcatgagccactgcgcccagccagcatgctgtgttctaatgctagagccagcaggagatagagaagtagaaggcatagaccctgtctcctttgcacttattgatcacttaaaaagcggcacactttatattaggtgctagatggtaggatgcaaacaggcagaccatgagagttgctgcagaaaatcagagtgtgtttgatgggccctgggggctggatatgagtaagcaaagagtagtctgtgggggcagttggggctagcatgagtcagggcagaattggccaatcagaggtagagcattctttagccaagtggcacatcctcaggggatacatctttgacatgaacttcatgaccctggctgggccatgctgtggtgtgggtccgtacatggaactccagtctttggggtgtgcttactcacaagcagttgactgacactgcaagactagagttgctacctataaggcagcacatcacaagctgaagggacttttctaacttctatgggatgtagtaactctggacactggaccatcaaagcagacaaaattatacatctctttttgccttcaggtagaatgcatttggtaagcagggagataatcataatcagttgactttgttgtatgttgcttctttactccctgaatctttttgaaaaacataatcatttttgttctttataatatatccctgtgaaagagaagcaggtgaaatgattacctctgacacacacatacacatatccacacagaaagttctttagaaactgaagcctagagatgcaaagtgatagcagttccatcacacagcaaacaaatagtacaacttagctaagaatacatgggccctccccctgccccccaaaaaacccccaaatctatgccatttgcaagcactctttgcttcacagagacatggccctttcttgcacactctctcctcaagccatccttcctagccatctgtctgacaagacggcatattcaggcagggtcagctactgactgacagcagctgaaacactgacggaagtgggatgaaaaacagcctgcagatggggtccggatgaggagggggagagctgggattagactaggatgtgagctttcagcgccctcttccactctcttctcgccagctggagcagcagatgactgtttcctctcactcggcaccttcttggttgggacagagtgttgtgtctgtctgtttagctgcagagtgatctgttgaatctgctacaagaatttcctggcctgggacctcactgggggttgggccaagggtagaagtagggaggccactagtcttgttgaaggtgtggtcccacagagtctcctggaagctttcaagcaggaaaatcttccccccatcaccccctcctttagctgagctgtctggctgacccactccatctcccaaagtggatacaccacggctggggacactaggcaaaattatgacttgagattgactccctctacccatttgtgattctccctttctttttaatttacctttctcttcttcaactgcctatcacctacaaaacaccttcatttttttcaggcccgctccgctctgatacccagtctttgtgtttgtattgtataacgtttggaggttattttttttttttggtaacgctttattgaggtatacatacctcatactgaggtttacatactgtaaaattcacccttttatgttgtaaagttggttttagtatatttacaagatgttgcatccatcaccactatctaactccagaatattttcgtcatctctaaaagaatcccatacctactagtagtcactcccattctccccttcccccagctcctggcatccagtgttcttctttctctctctatggatttgcctattttggacatttaatgtaaatggaattatacagtatgtggtgttttgtcactggccttttttttcacttagcagaatttttcaagtttcatccattatagcaataatattacattttatggatataccatattttgttcatccattcatctactgatggacatttgcattgtttccatcttttaactattatgaataatgctgctataaactttcatatacacatatctgtttcagttccttctttcaatttttttgtgtatatacctgggagtggaattggtggcttatattggtaactctatgctcaactttttgagagactgctagattatcttccaaagcagctgtactattattatttttttttacattctcaccagcactgtataagggttccaatttctccacctacttgctaacccttgttattattgtcttttttattatagccatcctagtggatgtgaaatggtatctcattgtaggattccccccaatagcgcctttctctttactggggaatagttccagtcttgtgtattcatcactgtgaagatattaaacctctgggaaagatagggcccttctctaactaatgattgaatctgggggcatatcaggcattctggcagggtggagaggaagagagtttagggacatggtgaacttgccacctttggaagctctaccatcgcagaagcaatctgctctattgattgctttcccttcccacaaagagaccatcaagtgcagaagtaatcaagtgaagttttcttgaaaaggcaagacaagagctgggcaacgaagggtgggaggccaaaggatgtatgaagggggaaatggagaggcttcctaaactaaaaaatattaaatcctttctgaaaagcaccttcagtagtgacctaaaacaaagatgaaagtcaaaccaatcaacaattacttttgtttagcaattctggaaaacatgttgcaggagaggacactggaaatgatggttaaaatacggtgggagccatggcagttcaagcctgtaatcctagcacctcaggaggctgaggcaagaagatcagttgatcccaggactttgaggctgcagtgagccatgatcacaccactgcactccagcctgggcaacagagtgagaccccaactctaaaaataataataataaaataaaatacaatgggagtgttggccaaggagttcactttttctctctattccatgccctttaggactactcataatcacaaatacatttgtgacccttctgagcgtaaatccacctgtctggggtgctcaataagtccaaagtagagtctatgtgcttggtaaatggctctggctagaaagcaactgcttggctaaatcacacctgacggtcttcccactgagatgggaaaatggggcagatagtgtttgcccaggagctggggcataaaaggattcttagtggatgtgatggctcagaagtgaatctctagttaccacttgggatctgacagtttttgagaagttctacagggctgtgaaagactgcacaggggtaaaaacaaaccttgtcattacattacaggtgttgagaatttctaaaatttacagtatataatactgattgaaaagtaaatgtcactgctactttggagttcagcataagccttatacagaggcagggtctgccagtgtggtaagaggatggccactgtaagggttaagtagccccacatctctttccctaccagcctgctttctgccctccagaaaccctatcatttatagctagtagtaaaagaacaacaattgcatttattgggcattaatatgttcctggtactatgctgaacagattatgtcttaccttgtttgatcatcccaacaacctatggggtaggtaccattatcatcccaattttatagatggagaaactgagactcagagatgctaagaatttgctcagctaataagcaataattagcaatggagctttaatttgaatccaaatgggacactctgaagtaaggcttctcctctccctaggacaggtcttggaagctgcatttttagcaagttccctcattcaggtcttaagttctagaaagtttcacactctttacccggtgctctacagcctcattatgaataaaacatcaaaggcctatgttacaatataattatctagaaaaggaccctgttttaaaacattatctaccattttcatttcagtatgaattacttaacgggattagtattaaggcctgccagcatgacctcaatgtgatgggccacaggagagttaagttcttatgggggaggagagtttggggaaaatctagaaatcgttggactctacccgaggaaagcagatctagttaagtcatcacatcaagaggcccaggggaaaaagaagtgatggcagttgaagtgctgaaaaaaaaaaagaaatctaaaggtaggcatcattgattcaactgatgggcccatttgaagcagtacctctgatctcagggagcatcccaaggaaaatgtcgtctgaatccacatagcctcagaatatgagcattgttactttttggaggtggggggaggctgcagacacccactcttctttgtttttgtttttgttttgagatagagatttgctcttgttgcccaggctggagtgcagtggcgcaagctcagctcactgcaacttccacctcccaggttcaagcgattctcctgcctcagcctccagagtagctgggataacaggctcccgccaccacgcctggctaattttttgtagaaacggggtttcaccatgttgactaggctggacttggactcctgacctcaggtgatccactgccgtcgcctcccaaagtgctgggattagaggtgtgagccactgtgcccagcccactgtttttgatacattcatcctgcaagatgtgttgcatcctggatgtatgctcttactttgcctgactgagatgcagctagctcccagctgctcctccctccattacagcagtgctctggtagaaggccatgggtgatttcccactagcaaccttatttgtctatgttccttccatttgggccaaggactaaaagccagctcagatttacacaattactttaacattgtttaagaaagcaatgtaacaacctccactttgcccagatggacgggctcaatgatgtcggtggagagaacccattattggaataagactgggaacacaaagtcatagctaggatctctcccactagtaggaatacagccgggcttctgatgaccagctttgtaggattgattttctatggttggaatggacccaaaatgttcacctagtctagtctacggccttcaagtagaagttttttcaaacgtagtcttcaaatttaatgaggaatacatttatatcattcaagaatatgaatgcatatgtatatgtacatgtatatatgattatatatctaggtatacatataaaagaatgcaatagaatatcttattcaccccgtcccacactcacccaattcttatcttctccctacaacatgtagttcccccccataacttttagtggttatatatctttccagatttttatgaaaatgtaagcaaatatgaatatatatatatattttaaaaatattttttcatttacataaaaggtagtctattgtgcacatcattttaccccttgttttcatcatttaataatatatctttctgtattagtgcacagagaacttattcttttatagaactacataatattttgttataataatgagccatcatttatttaaccagatttctatcaatggacatagaagttgtttccatattcagccattacaaacaatgctgcaatgaataatttttatatgtttcacacatgtgcaagtatatctgtagaatgaattcttaaaaataggattgttgggtcaaatatatatgtatttttaaatgaacagatattgctaaattgcccttcatcatgttttaatcaagtcttcacagacttaccaagagagtgttttattcaaacttttggatttttctaaatctgctaagaaaaatggtatttcattgcagttttaatttatatttctctaatgaatgaggttgattttttcatgtctaagggccacttgtagttccatttctgtcaactgtctatttatatcctttttccatttttaccattgggttatgaatctgtttcttgtcaatttatagaagctctttatatattagggacaaataggattttaatccccaaacagcaaatatgtgaagagattctattccagtgttttacagtgtcttatggcagcaaactctttcttcaaatgaaatttaaaaaagctaataaaaacacatttcactaacaaagtaagaggtattctgttgaagtagaaatggggaagggattttttttttcacatccctcaagtacctctgaagaatcctaaagcagcacagaacctagtttgaaaataatttccctacatgcctagttggcctgtggttccagtttctaataactctttcagcaaggaatcttttttagtatctaacctgaatccttattgatgcagttgatactcctccccacttaacattggcaatttgtgattatttgacctctcttccattatgaacctttatgtgttatttaaatacattatcatttaacacctttttgtgccttcccctccaatgaaagcaggattttacttgaagtcaggggaatgtcctatttatctttgtagctttaaggtaacataatgccaggtattgtcaatgtatagtcaaggatctattagtgccaggtatagtcaaagacctccacaagtgcttgttgaatgaataagaaaacaagagagaaatagtgttttgactcatgtctccatagcacctaccatacacatcagtgcaaagcaaatgcctttcagttagttatcatctatggaaattgggaaaattccttcatattcttcaactttactgctttcctctctgtgacctctttctagagcaagatcatctaccatttattgtgaatgttatgtaccagatacctttgggctttttaaaattaattatcgctgaacctcacagccacgtaaagtagaaggcatactcaagccttcctaagatcacagaaccaagacatgccaaagctggtgtcttagtctgtttgaactggtataacaaaacaccacaaactgagtagcttataaacaacagaaatttatttctcacagttctggaaggtggaaatccaagatcaaggtaccatcagatttgttctctggtgagggcttggcttctggttcagtgatgataccttctccctgtgagcctatatagtagaaggggcgaacaagctcccacaggcctcttctattaaaagcactaatctcattcatgaggatgttgcccttataacttaatcacctcccaaaggccccatctcctaaaagccatcaccttgggggttacgatttcaacatatgaatttcagaggcacacaaatattcagatcatagcagctgggaccccagagaccaatgtttgcagaccccagagaccaggctcagttatcttctcttgcatcactgtgagatacgcacatagaaacagcatcctattctaggggtttctttcaaggcctttttgtcattctctcttcccatatatttctgagacttggggtaaagccctttagatgatgtagttttactttgttggatgtgtatgtctctctgtgtgtcatgggcaattaaagggactataacctcttctttctagtctttaccttcatttccatgtcccttctccagccacctcccaatagcctgcaaatgttctaggactctatcagtagaatgacagagaaccaaagaaatgctagcatcaggctcagccatcagaagaaaagtaggaaccaaagtaatggcagcaatggcaaaagaaaagatggcttggcgtcaaggagattagcaactgatctctgaaagctctggggaggtttgtatttataacactgggagcagatttgtctcctgacatacaagctgcttttctgactatccaagaactgtcctactatggaaatgatcattttatagggtggggagagtggggaagagagcagtcagcatgaggacttggttccagagtgtgggaagaagggtaacaccaggagaggagggaaggcgtacaaaaagaagtgaagtggaaccacaggcttcttggtaaaatttgccagttgctctgaaggacaaaaaaaaaaaggcctgtggcagttattcagactgaggtgttagttagtgacaaggtgtaagtgtaccctctcatataattcttgggattacaaaatctgattgcaaaaggtagccatttaacctagaggaatggacttccaatagtggcattttaagcatcagtgtgagaaaaggtggtaagagacatttgggataagggggtattttctgagcatcccggaaatcatagttctgcttacatatgagatcatccctcacttggggagaagaaacctcctctttcccaacacatctgtggtcacatgacttagtgcttgtctgctcaccctacaatggttttttctccagtcctcctcttagtgctaggtgggaatttgactggaaacagaagagatgggggaggttagaagccacgcagcctggtcattcctattgtagcattccctgaggggccctgtagccagctttgctttgaactgattttctgctagttttcagtcaggaacactgaatgtgttccaaggatatttgtttactagcccagccaccttggaaaatctgggagaggagaaggtaaaatatgaggtggtttttcttccttctgcagttaggaagcatgctgtgttggccctctaaagatgcaaggggagatttgagtccatatcgcattcctagaaatattgaagcttaaagaggtaaagtgccttgtacaagattgtggggagtcagtaccattgagttgggattgtgactcagtgatcctgctctgaagctttaacacccattctgtgaagagcacaaatttgaaagcaggaaagctatatttctgagttggctctcttgttaaacagctgtgtgacatgggacaaatcttttggagtactagtagcctcattttcagtaattcgccccccacccccgagatacacaccattaagggtgttgcaagaatgaaataagaatgagatgttaagaattttattgcataaaactagccttaagcatgaccataattggtttctttttctttgattctactgtgtcttcctctctttctctttctccctatctcctgttgagtagaataatagactccagtgccaggttactcagaagactattgcaaggaagattctcaagatcattcttccactggaaaatctcaccctgcagttgccttgccattgattccttggtagaaggcccggttcaaaaatcaagccacattcttttgaggcaaaataattccaaacttcttttttgttgttgttgtttgtttggtattccaaacatctgccagctcccataagagccgtgacaaatattattttgtaggtcactgtagatttccttcaccacaaaatgctgagatttggaataattagagcccagggggcaaatgggcctgcttctgtcctttctctgatgggtttcactcatgtctgccagctgcagctgtctgattgtatacgcttgtgggcaggggcagggcctcttagcccagacagagttaattagtatgagttaaactctttctaggagctaaggctgtctttataaggcaaaagtaaggaactttctttatatcctctaaagggtcattaataagtagttaacaccctgagagtgaattactcagaaattgatgttagatcgacttatatagcaaagtatagaattgagttagttacccaaatcgctgaagccaaaagaagtgcattgtctgttttctgggtattttaggccacaacattagggacagcatagccttcatgttctagtggtttgggttttggtttttaattaaatggtcccttccttattataggtttgaagtgattggcactttttttgatagtggttatgagggaaggttctagaatcagtcagacatcaagttatatcttagtgctgccacttgcaagttgtgtcaccttgggcaagtcaatctcttaagccttagtttcttcatctgcaaaatgggcataatcatgtctacatcagaacattattagtaagagccaatgagattatgtatgtaaaagcactcattcctgcctggcacatagctagggcttgataaatggtatctattcgtgtattattattattattatggatgttattattgttagccttatcattttcactacatactgagaataatttcattctttttgcttgtttgtttgtttgtctgtttgtttgttttttgagatggagtctcgctctgtcgcccaggctggagtgcagtggcgtgatcacggctcactgcaagctctgtctcccgagttcacgccattctcctgcctcagcctcccgattagctgggactgcaggcactcgccaccatgcctggctaattttttgtattttttagtagagacggggtttcactgtgttagccaggatggtctcaatctcctgacctcgtgatccgcccgcctcggcctcccaaagtgctgggattacaggcatgagccaccgcgcctggcccattctgtttttttttaaacagttgtattgaggtataacttacccaccacaaaatagactcatattcattacagttttgactgatggaaaagaaaggatggttcaactctctaagcctctccctaatgaaacacacagctcccctgatttctctccttccactgtcttatggcaggcactttccaagctctggttgtatcttttgttggtttcaattccttttttcaccactcactagctttgtgacttcaaataattcacataacctcagcaatcctatttccctcaaatgaaaatgaaggtaagaatttaccctacttgattcacagggttgttatgaagctccattgtaataatatatgtgaaatctctttgtaaatggtctgctgggttactataattcacaaatatgagtttcaataatattcaaatgtcatattgtgtgcttcagacattagatgccttgagagatccagattgtggctggagttatttagagaatgcttcgtggaggaaaggcggcataagctgaaccttcaagatcagataggacctcaatgggtggaaaagagtcagggagtgggcagtctcggtggagggattaaaaaaaagcaaaaccacagaggctggaacaaacagataagcacaaaagtgatttaaaatgtaggcggtggccgggcgccatggctcacgcctgtaatcccagcactttgggaagatggggcaggcggatcaattgaggtcaggagtttgagagcagcctggtcaacatggtgaaaccccatctctacttaaaaaaaaaaaatagccaggcgtggtggcaggcgcctgtagtcccagctacttgggaggctgaggcacgagaattgcttgaacccaggaggcagaggttgcagtgagcagagctcgcaccatgcactccagcctgggcaacagagtgagactcagtctctaaataaataaatgtgggagggaataaagttaccagggcagtataatagatgggtccccttctgaagcaactgggggaaaagattaaatgagatagcatggactccttcctttcaggaaagataatatcttattcatctaggaatattagctccatctaggcagggaccttgtccatgttctctgatccctctctaacacatattacaattcctggcacatagtaggtgctcagtaaatggtcaacaaataaaagaatggatggatggatggatggacggatggatggatggatggatggatagatcataatgtcagctgctgtacttgtctggctgttttaacattattcaaaatcattggtcactggagcggggactgtcttaaaactccctctatgtagtacagccccgtctgctgttgggatttatgaaattcttgtcaatgatgccaatactcagtgtggtttttctccaccctgttctagaagactccttacccccagtgaacaataaggtgaccagcaagtcttgcgagtacaatgggacaacttaccaacatggagagctgttcgtagctgaagggctctttcagaatcggcaacccaatcaatgcacccagtgcagctgttcggtaagaccctacatcttaacattcctgctaggccctactcaaatacaagagcttcctctgtacttgtactttcatttgtgcctgcactgtaaggtgtttgaataaaacatgacttgcattaaatcataagcctccttgacaatccaaactccctgatcttcacccaccctgaacaactctgttgaagggctcaggcccaatcatatcccagtcttaaagctgtaggactgcttaaatgggcaaaggtgagctgtttgtgttgatcggcgctccttttcataataattataccaccaaagcctccatctgaaggactcacaattatttgaagctttgggaatgctatgggtggaaaagtcactttgactatctagggccactcactccaattaacaagaaaatgagttgtctgttagttcccatatctgaagtattttactaaccagttaattcctagtgccctgcaatgagaaaactctctataaatgcttggtcatgatgactaccaggacattacttgtcagaagaactgcatttactttacaaacaacgtatactaattacatcttatctaatatgcagtccggagaatataatcaatagaactagaaaatggagtaaaatgagtgtttaaactgaagcaggaaggaatgaagttagatgtagtaacaacttttctgcctgcaagtggcattaagcactggattgtcaagggaagctatagaatctcttccctttaggacttttagtaagaatatagtatctcagtagtttaggagaattttcgtgtggccttgctttcttaatggccttccaggaatcattctagccccaaaagaatgtgcttctaagaactaagaacaaggtttaaggaataacatttgaaagatagaaatttaggaaatcaggattattgcaaagacagatgtaaccagcaagtaaattttatcctctcccttgccttgtgctagactgagctgtggccatcagatcatcttgtatagttttgtattaccccagagagcttgttcctttggtttggaagggagagtctagtgaatattacaaatggaagctatgaaataaatcttcattcctttaaacccccaatccagctgggggaccaagggtaccatgaacagagaagaaagaaacaagactataattcatggttcagaggctcatggcatccctgacagactactttgtaccaccttagaccatgatgctcgactaggattgctaacttttctgtggcttagtctctggcatggaggaattgtaggagaaaaaaaataatgcgtaataaaatgtaggaagtaccgagaactgacgatgggagagctggggggaaggacatgccgtgttttgagtccctgctctatttcaggtattaagtgaagcctttacacttatcctagatgcttctaatcttaattctgtttctccttggcaggagggaaacgtgtattgtggtctcaagacttgccccaaattaacctgtgccttcccagtctctgttccagattcctgctgccgggtatgcagaggtaggtgtgttatatcccaagacccctgggtgctgctatcctgtgtagtagaatttagaaaggaggaaaatacctgtctaatgtcctagggaaaggtaatttttatggtagccttagtttttaaaggtggtttaattaacaaagggaaaaataaataaagcattgattttaaaggccacagcctttaaaaaaaaaaaaaaaactacaggatggagtgctgtgcttcaggggaggatgggaaagagtcatcaaatgtgaaagtgaatatatttatttctccatccttaatcccttctagcttggcccttaaattattgtatcataaaacacagactattttcattcatagccttagaaggaagaatggaccttgcaaggaattgatgtggccattttgaagactgtgcagggcaaatttaggtatactttttaaaccccataataagatggtgacaaactcaataaaagcaaaacagaaagcattttctcaaattatattcaaaattgaattgtcttctcacattagtctttttttctttaggttttattttttttataatggcaccagttttttcgctaggttcctgggatcaagtgtaatcccctttaatttctcctttgttacctcttctcagattaccaaatctttcagcagttatctgtatctctcccttttcccactttcccactggcaatatccttattttgtcctttttccttctatccagtcaacatattttttgaccatctactgtatgctcagcattgtgctagaattggggtatttatattgataaatacagtagatatatagggtggtgctagaccatatggcatctttatgtgagttacaaaaaggattcccttacataagatactttattgccatttttcagaaaatcccagggaaagcacctttgtagctgtggcatccttttgcagcacacaacctacacaacaatatatatagcatacatagcagccaagatatgttctttgctcttatggaactcaccagaaaagacaaataataagcaaacgtggaaatacagataatgcaagtactatgcagaaaataaacataggactgagattaaaaataagtagtttatttaggttgagttgtcaggaaggcctctctgagaaggtgacatttaagctgagacctgaaagataaaaagaagtcacccatgcaaagatcccaaagaagaacattctaagtagagagaaaagaaagttcaaaggccccaggcagggaagagcttaaagcattcaaagagcctaaggaccagtgtagctgaaatgtagtgattgtggttgaaactgacatgggatgaggctgaagaggtaactaggaattagaccatgcaggattctgaaggccatgggaaggattttggatttccatttttaatacattgggaagctattggaaggttgtgagaaagagtatgaagtgatccaattaacatattaaaagatctcactggctattatttccagactagactggagggaggcaataatgcaagtggagagactagcaagatggttagggtagtactctttccagtgtgagaaaaagggtgcttggactgagaacacagtagtggttcagagtggagcctttggagccaaactgccttggttctaatcccagccttgctactttgtagttgaatgaccttattcaacctttctaccaatctttaaagtgaggataatgttagctcctaccttcaagatgtttgtgagatttcaatgagataatataagagaaggacctggcacagtgtcttgtatatactgaggacccaataattaaaagtggacaaatttgaaatacatttggagccgtggttctcaactatgggtgcatattggaattaccttggtagatttataccagatcagaaggaggaggatgtgattccaatatgcagctaaggttgtgaaccactgagttagaggaaaaaaattataggatttgctggtgggggatgtgtaggtgacttctatacattactgccattttaatcttccaaaaagcaatccatcaccgtgttacacccctgttcaaaaatttttatgccaacatgtatttggacttactatatgtcagtcccagttctaactaagcattttacagatatgaactcacttaatctcatgacaaccctatgtgaggagtactattgttctccctgttttatggatgaggaaactgaggcagagagcggttaagaatcttatccaaggtcaggtagctagtgagttgaggagctaagatttgaatcctggcagcctggctccatatttcaggctctaaccacagtgttctgccactgaaagggatgactccctgtcgccactcaaatacatgtcaacccccgactctgatagtgaaggcctttcatggtctaacctcaagttacctttataggtcaatattcttccattcatgcacctcagggcccactgcattgttcctgtgctctcttacctttttacctttgctcagtcctcttcctgtcagtgtttctcacactttagtgtgcttcagaattgctcagagaacttgttgaagttcagattcctggatcacacctgcagagattctgatttagtggccttggagtgggacccaggaatctgcatttaagcagaccccatcgttcattctgatgcagaatggtggtctgtggactgtcactttgagaaaccattcctgagaccatgtagataacctggaaccaaggatttgttttaaaaaatctgagtttagtgcacttaaattgagcacattaaaattctgaaacctgagtgaaccagtggaaaagcaaccaatttcagttcctgattggttaaagcatctaagtccgaccatatggcaaccaatttgagatgaatgagtggtggccatttcatgataaggaactgggatgaaaaggagacaaaagggctgtctaagtaacaactgcacatgtacaggttggatggagaaaatgtttcctctttctggaaaattctttttctccatccctgcctgtggaagtcctgctagtccttcaagacctagcacaaatgcagcttcctcagattctattgcaggccgtcctcaggtcgcattttgataagtagtagttggaaggcctttcttttctgccttcccacttccatccctaatttctccacccataaatcctgcttatccttcaaaatccagcctaattgccacttcttccatgaaatgtttttaaatcctgcaaactagaagtaaacctgtctctactctaggactcctcagcacttaacctgtgcttcttctggagcatttatcaccttgtcaacttctgttttttattatttgtgcccatgtattatcatccctattaatgcataagctcttcaagacagatactctttttcatttatctttatttctcccactgtgccaggcagagtaggtgctctttaaatgaatgcacactagattggaatgattactagaaatttagtcaggatttgaattaggtgctaccaaaaaagaatatggttgttgtgcatttttccccctgaattactgattgactgtggtagatggtgttgactatacattgattcctcgtcaataggaaattacttggtctcattcctgatctccaagttgttttcttcccctataccactttaggaaactacagttaacattgctttttggaaggactgagcttgtttggactaccagtgtatgctcatcccttttaatatgctatttgcatcagccctcataagtcaatatggatttagttacagcctaatttgatttatgctttggtaaggccctggatctttccatacatgtttctcacaatgtgtgtgtgtatatgtctgtactacagtgtagctgttacatttcagtcaagaaagatggatattttgttcctcacctcctttcttgtcttggccccaacttaatttcagtgtggctcaaaagaaagtccatactgagcagaggtgtacatgtggttgctaatataaccagttggtcactataatccagctgttaggctgatattattccctttggggaaaaggatatgtgaaatctaaactggaaaacaattgataatagaaaggaaaggcaacagtgaaaagacatgtcactgcaacctaggggcaatacggtataatgcaaaggacagaggctctgaagccagaaggtcatagatttgacattgcagggctaccacctacgagtgctgttatcttggacaaactatttaaccactcaaaaccttggttttctcaggtgtaaaaatggagattatgcttactacgtatgaaatgggttgtgtagattaactgagatggcgtagagtgctaggagatggcctaatacagagttattggtttataagtaacaattactatattttatatagtaattactatatttattacccccgagttaagtatcattgcaccttctcctctatctttgatagttttgcctttttaaaatgtaatctccatagacagaactttagttctagttcttcttgtggtaacagatcctggaactagctattttatgtactgttctatcgttacaatttaaatttcttttcttttttatgtcctcagaagcaacagataaaagctagttattactggccatgtattgtccctttatatacttgataattcattaagttctttctttgcaacctctcatccagcctaaatgcacaattttctttcatcttcctttataaagactaaatcctacacttttgtaaaaattgttgttctttcattgcctccagtttctttgcatctttcagctgtatataatgtggttgaaactcctttgaagttctaacttttgaagcacctagttattttttcccatggaaatgacgtttttacaatactgtatcttatataagcgtattactcatacagcagggaacccagaaacctctcccctatgctggccaccctgactgcaggccaaatactgaagaagaaataatcttttgactgctgaacttgcaaaccttcatataaagggcattgaaatagcctctctgcactgtccccaaacactaatgtgtgtctttcttcctgggtcagacagcaatcctagacgcggattgaatctcagacctagccttcattggctagacgtgtctttgaggctgggacagtcaaggagagcgttggcagaatgtgtgtcattgctagcacttcagcaaacctcattaggactggaagcatagtgcaaacagccactggaaccttaagggaaattttatcagaagaaaaaatctcttcagatcctgtgttagtttgctaaggatgatagcctccaactccatctatcttcctgcaaaagacatgctctcattcatttttatggctgcatagtattccatggtgtatatataccacattttctttatccagtctgtcattgatgggcatttaggttgattctgtgtcttcagaattgtgaatactgctgcaatgaacatttgcgtgcatgtgtctttttttttccccaaatactgcatgttctcacttataagtgggagctaaatgatgagaacttacgaacacaaagaaggaagtaacagacactggggtcttcttgaggatggagggtgagaggagggagagaagcaggaaagaatctgtacaacaaaccctcatgacaggagtttacctatgtaacagactttcataggtatcctcaaacctaaaataaaagtttttttttttttaaatctcttcagagattatactactgccacattctgggaaggcaggcttcaaacccaaacccacacccagcttccctccaccattgatcatttccacttcctgtcccctgctcatcttgccaaaacaacagggaaggctatgtacttggactctagacaagggaaaggtatttggggtaggtattaactgtattgaaagccaagtatgcatttagtaaatggtgtctaaatgtagcacgtacaatgtgccagacaatgttctaagcacttatgtgtggaatagctcatttgatcctggcaaaaatagtagcaactatttatatccccattctacagatgcggaagctaaggcagaaaagttgagtgatttgtccaaggacaaatggtagtaagtggcagagctagaattttaacctggtcagtctggcttcagagtttcaagctcttaacttctatactacctgttgggacccattcataggagtatgacaaggatatctcctagtacaggggagtaaaggggaagacgggacatgcatggcacattgttgtgtgcagatactcctaagagagtatcttaccacactgcccatgttttcccatcaaggccttaacttacccttctctcactctaggcttaaagtgtcttgagtgtaaatgtctactttctttcattcagcaaacattgttaagcaatcactaagagcctggcactgcaccagtgctagagatacaatggtgaacaaaaatggacatggaacctgccttcatggagttttagtagggaagatagacaccacgtcatgatataagtaattataaaattgcaactgtgccacatgccacaaaggaaagttgttataaaagccaataattgagaggggttgacctagtcagggaggtgaaggaagacttctgagactgtctctccagcctcaactcgcaccacatccctccttgttctctgcactccagggtgaggaaagattggctcaaaaattagggagataactggtggcagtcatacactcctgggatccccaacttctgatcccaccatgaatccagtccctccccaggctgtaggggtctataatgttctttctacattatacatgctacataataccctaatctaggaattttcttttactcttctttcttttggctgtttcctgtttttcagagacagggtctcactctgtcatccaggctgtagtgcactggcacaattatagctcactgcagcctcaaactacaagctacccttctgtctcagcctcctgagtagctgggactacaggcgtgcaccaccgtgcccaaccaatttttttttttttttagagacatggtctcgctatgttgcccaggttggtctcaaactcctggtcacaaatgattctcctgcctcggcctcccaaagtgctgggattacagacatgagcccagcctaggaattttctttttgagaaactacttgatcatgctaccatttcttaccatattatccaatctgaatttttcagcttgtttttaaagaccctctgtgaaacagtctgatccttccttaacctactttccagcctcatttctctgacaccaacacacacatctcctttaggctggctggctgatctctttgttctgttacatgctatgtttcttcctaccttccctcctgttatgtgcttcacttaaactgttatttttcacaagcttggaatagcccccgctcctcttctacctattcgcatcctactcatctttcaagggtccagttgaagttgcacctcttctaatagttttgcccaatcactctagttctcattgatcttctttgaccaccttcaggacttaatctggttcaaaaataagcattcagaaatatattcttgcactgttattgctttgtgtcttcctgtttcccctggcataacataatattaatcatatatcatgctgactggtttatttaatacaaaaagagccacagtcacaaaaagctcttgacagcattccaagtacagatgcagtagggaggcaggagaaatggtggaacttacaatttgctcaacccaagcccgttcatccaacatatctcaaatgagcccagggagaaaatggaagtcactttttatgaaattttgatatttctgctaactccttcaaggtaaatgaaactggaagcaattgtttaaaagtatattagtcagtgttcaagataagtgccattttacctaagacacttgatttctctttccgaaagagcagcaaaattgcacctcagatcccatctcagctagaatccgggatcttcagggaagtggtatgtgagatacttcattgattttaaacatcataaaaattgaccagtttttcaaagttttcaaaatcaaagaaaactgaagaaaataacagcaaatccaaatatagattctcacaaattagtctcaagttgtttatgttttggcccacattttctgcagaaacaccaccatctcctggtcatgatgataggaaagaaacattgttaatgagaaacactactttaaaaaatgaaaattcatcttgtataactgaaaccttatgcctgttgattagcagctccccacttccccctccaaggtgaacaagttctaaagatctgcagtacaacattgtgtgtgtatagttaaccatatagtattgtatacttaagtttgttaaaagggtaaatctcgttaagtgtccttaccacaataaaataaaaaaaattaaaattaactcagtaatttttgagtttatacattctcacctaaacttcaaaatacagtccgccctctatattcactggttgcacatccatggattcaaccaactgcagatagaaaataatttttaaaaacacgttaaaagtaacagtacaacaatctaaaaattacaaattttagaaaccaatatagtaaaatgactatttacatagcatttacattgtattaagttttataagtaatctagagattatttaaagtatatgggagtatgtgtgtaagttatatgcaaacactatgccattttttatcagggacttgagcatctgtggattttggcatctgtggggggtcgtggaaccaattccgcatagatactgagggacgactgtgtattgatatactctgatattttcatagctatagaagagtctcgctgtcattaataataccttttcaaaagtgaatcatttatgttcatgtgtatgggaccattttagagatttgccatcctcacctacctctcctcatctaaatcccaactggatctccttccatggaaatgttccagattgtttttgctttctctccatctcttgtgctcaaaattcatccccacgtacttgctgactgtcccaggaccccgtccctctaaggtcatcatgttccttcttggcatgtttcttacgtctagaatatttcttcttgaatagaaagtcattcagacagtggatgggacagcgttgactttcacattgagtttaacaaattaatagcactgattcctaatcggccatctgggttgtcctgtcagggtcagtaataccccattctgtttctgggattggaggacttttttgtgtgtatatgaatctgtttctataataaaaataaggaattcccagtgaagcatttcagagcaattatttcttcatgggtggttaaagccactctttcttcaaccttattctttctaactccttcaaggaattccatagctgcccagaaacaccattggatgtgcccattactcacattataatagtctttatgagcttagactccaacaatttatagaaatcaacctggtttgttgactgacagtgcaaacagaggtaaaagatacatgagaaggaagagcagtgtatacaactgactgcttttcattttcaggttgaccagacagtcagcatgggtaggtcattgagtttctcctctctgtcctgctttttattttcagttcatggatgtggtagcacagaactctactttatttggatacttggatttttttttttaagacagagtctctgttgcccaggctggagtgcagtggcatgacctcagctcactgcaacctctgcctcctgggttcaagtgatcctcccgcctcagcctcccaagtagctcagactacaggcgctcaccacatctggctaacttttgtatttttagtagagacggggtttcccgatgttgtctaggctggtctcaaactccttacctcagatgatctacccgcctcagcctcccaaagtgctgagattacaggcatgagtcaccgcgctcagtgggcacttggatttttaagacttcactttataactttgtaaattgtactcctaccaatgaagcagatatctttcctgtcaagcctcatttttagccaagagagaaaagagattttaattaagatgcaaactcttttttaaaaaattggaaatagaggactagcataattatgagaaattctaagccagtttagaaggtgtgagccgaagaaatctctctagccatttttaaaaatatctccaggaccctgtcttccaatgatttagagatgaaatgattccttttcaatgtgcaggcatgcagttatctttgctaggctttgtttgcttgtttgtttgtttgtttgtttgatccaagcccttttctttgttaaatacacagcacacttgtgggagtcccttaagccgggtattcccccatgtgtaagctacccttgaggagaaggaggaaaaagaagtggaggcaaagaatgggaagaaaggggattaggaatagcagctaacatttagctgacacagtgtgccaagcacaattctaaatgctttgcatatactaattcatttaatcttcacaaccctataaggtaggcattattgtctccattttagcaataaggaaactgaggcacagagaagttaattcatttgcccaaagtcacataagtaggaaggagcagagccagaatttgaatccaaactgtttggctccaatctgttctcttagccattatattatactgcctctcaacttggggaagcaaagcaaatttgggaactcttatttctgaggctaccgggaggaacagactgtgtgatgaccatctttccaggggccagatatggtaacaatccagcagatgcattgggactgctctgagaagcaaagattctgtttctcaccataaacttggatctgtttagccacatctccattgaaagagcagagtgtggatggtgggtaccatccagctcgtagtttctgtattcactctcttctgatttcctcctggaaacgcatgcattctcacaatgcactttttaaaaagtaagtatttatgatttttctggacaaataattttgtactcttcttcagatttggcttgctactgttggcaggaattccccccgttgtgtgtgttttggtatttctcaaggagctattttgttaaaaatactaagatcttatattgacagcccaaacaataaagtacttcatttgacaaagaagtattttttaagaaaataactgtctgatcctttttatggctgtatagtattccatggtgtatatgtgtcacattttctttatcccatctatcattgatgggcatttgggttggttccaagtcttgctattgtgaatggtgctgcaataaacataccggtgcatgtgtctttatagtagcatgatttataatcctttgggtatatactcagtaatgggattgctaggtcaaatggtatttctggttctagatccttgagaaatcaccgcactgtcttccacaatggttgaactaatttacactcccaccaagagtgtaaaagtgttccaatttctcatcctttccagcatctgttgtttcctgactttttaaggatcaccattctaactggcatgagatggtatctcattgtggttttgatttgcacttctctaatgaccagtgatgatgagctctttttcatatgtttgtgggccatataaatgtcttcttttgagaagtgtctgttcatatcctttgctcactttttgatggggttggtttttttttcttgtaaatttgtttaagttctttgtaggttctggatattagctctttgtcagatagatagattgcacaaattttctcccattctgtaggttgcctgtgcactctgatgatagtttcttttgctgtgaagaagctcgttagtttaattagatcccatttgtctagtttggcttttgttgccattgcttttggtgttttagtcatggagtctttgcccatgcctatgccctgaatggtgttgcctaggttttcttctagggtttttatggttttaggtcttacgtttaagcctttaatccatcttgagttaattcttgcatgaggtgtaaggaaggggtccagtttcatttttctgcatatggctagccaggttttcccaacaccatttattaaatagggaatcttttcctccattgcttgtttttctcaggtttgtcaaagatcagatggttacagataagtggcattatttctgaggcctctgttctgttccattggtctatatatctgttttggtaccagtaccatgctgttttggttactgtagccttgtagtatagtttgaagtcagatagtgtgatgcctccagctttgttccttttgcttaggattgtcctggctatatgggctcttttttggttccatttgaaatttaaagtagttttttctaattttgtgctttataaaacttgcagatttcttgtattgttgtatatcatcattggaagctcaaatgcctatcagtggagaatccttatactagtttccttttaaagcttctctcaaatttcagcacacttgctccctcccagcagaatttatagaattagatgtttggcagaggctccctaaagtcatctgcttctactcacttcttcatctctagcttcggtatggagcactggcattaaagtgctcccccatggaacccagctcatggtaaggagagacttcacaatgggtttattcctccctgctctcttccactttgccctgattctgctcatttcaacttctgcctcaaaaaatacagagaacatttcccctgtctcagggatttgtctcatgtccctttgccttatgattagagtgactatgtaatttactatctcaaccgaggcacattttgaaagcaagagctgcaatcttaataattatgcctgccagaaaaacaggcaataaaactgagttgtctgagataaatctgctctatggctaccctatttatgatgtatggttcaaaagtggccacatgctggcatagttttgctctctgaggcttatcttcatgggtatctcggaatctcattgtacacttagtccttttgagaggacagtttacctctctgacctgctcaagccaccagagattaatggaagccacaggagttataaacagtctgaatttcagcctagcttttggccatttttcaaatacttgttctccctttctcccactactagaaagccaacccattacagcttcatagggtaccactcagagagagtatgactgaggtttgaataaacaatacatgtggcttttagggttaaatgaatattgtttgacatacagtacactacacttgtttttatttcagttcaaaaaattggttaaaattatatcttgttgcttctcaaaattaattagaatccatctgaatccattagaatctctgttttttgttttgttttgttttttacaaaaagacttggctgaatgaaaaagcctccatctcattcagataatctttccagtgatcagacaaaaagagcaaagaaacaggttttttagggtattggtgcctactttttttcaaagtatgatatctaaggttgcaaatggacatacctattttcagctatccagacagactgtacccaggtctagagaaccacttatagccttataaaatgtcaacatctaagaagataattccagtttaattatgggttaaattaaatagaataattcaaatgttaaaacgtttagcagctacttaatagacttaatagaacattgaagtttagagaatgcaattttgatgactttgaaagctcagaggcaccagaaatgctaacagttcctagtatttatatatttaatgtatataatttataatgtacatagtatatcttatatataaatatagtgtatatatacatatatgtgtgtatttatatacaggttaaatatcccttgtccaaaatgcttgggactggaagtatttcagatttccgatgtttttggattttggaatatttgcattgtacttaccagttgagcatctctaatccaaaaaccccaaatccaaaaatgctccagtgagaatttcctttgagcatcatcagcactcaaaaacttctggagcattttagactaggaatactaaaacctgtatgatatatataacatacagttttagtatgatatagatgatatatatatatatatcatacagttttagtatgatatagatgatatatatatgtaatacaggtttagtattcccccattacttgtttttgtcaggtttgtcaaagatcagatggtatatatatgtgtctgtgtgtatatatatatgtgtgtgtgtatatatatatatgtgtatatatatgtgtgtatatatatatgtgtgtgtgtatatatatatatatatatatatagtctccattactttttaatgaagtgctgaaatttaggtatgcattcttgtctgcaaatgctcatcaaatacacatcacgacacactcatctgatttgtgttacagggtattagtattcttctcctatgcctgatagtgacttgcctccttgattttccatcttacctctctgctcatttgtaagaggcgctatgtgcttctataatgctttgagattctgactggactataagtatttaatgacactctttaattaaaatccttttaaaaactctagggtataaattaaataaactgaacttttcagaaggccagctaagtaaacattttatgtcaataccaatcattaaatctacattttaaaaggacatttgatgaagagaactagtctatcatttttcttttgcaacttgttttctcccttttgactacttaaattaggcttgaaaccacattatatagcttttacattttgttttgccatttgctggtaaatctttactggtttctattcgtctctctagtcccatattttatttggcccagacccactactgcccactgaaacaagggggacaagtaaatctaagctcatccctgctcaatcactgtccccagctctccagatttgcaacccaagagttgtcagatactgatttcccctttgccttccttccccatcatcaaatcttccttcagggtcttatcagtttcttttcatctgtaggagtctcattcaatccttcttgtgtgttattgcacagatgctcatggcctattacatattactatagcagcttcctgtatggcctcctgcattcgagttactccccaactagtctataccccattgccagaataggcttccacaaatatcagttttatcataggaacccctacagaaaaattggcaacataatcaaatgtgaattcttcagccttttacaaaattttatatttttttgaatttttactgtttactttttacaatttaattattttcttaaaattgtgtgggtacataataggcatatatatttatgaggtacatgatatgttttgatacaggcatgcaatatgaaatgaacacatcatggagaatagggtatcgatcccctcaagcatttatcttttaagttacaaatgatccaattacactctttaagttattttaaaatgtacaagtaagttattattgactatagtcaccctattgtgctatcaaatagtagcacattatttactacccctatttacctcaacaacacaccccactgtcattctccctccctccttcgctctccctctcctccctttctctctacaagttcaattaccagcgtaatttctcttgttttcatatctgaagtttctactcaagccacaccttgcttgctgtctccagtatgtgacttgctgtttacaaagctctggtcctttgccaatgtcactccctttggttgaggtactctctgcccttatcactgtcggtttatgctgtgcagtatctacttctaaaaatgtgacttaatggttctttcaggaagctttctacgattacatctgactgctcactcatcccattcagtgtctcctaagcatgtgtatttcatttgtatttgctttttttgtgtgtttttaggctgtttcctatattgatttcccatcacctccaacctgggtgtaaatatcctgagggcaagagcccagcctgattttctcctctttctgctgtagtatcaggctcttcacccaagaagtgttcaaagcatgttaactgactcttgggcataattttctagttataaacatagttgaaatcatctttgttttacagtagtcagtcagggtttccacagagttcagcttgcagtctacaatctttactcagacatggaataaaacaggcagaaaagagtatatatactattgaccaagcacttaattctgtatgttttactgcagttcaattcaatacatatattgagcacctgatgtgtacgcagcaatatgctaagtgctccagcctggttattcacaaactcctgcatccatcagaatcccctggaaggcttgtcaaaacccaggatcaccagcccccatcctgagtttctgacttagtaggtatgggttgggatctgaaatttggcatttctaacaagtttccaggtaatgctgatactgctagtccaggaagcacattttgagaagcagtggtctaggagatacagaggtggtctaagacataatctctcattccaaggaatttacagactctctagggagacaaggaaggcccagaaaacatttaacagtaataaatattgtacagtgttttagtatttattgattcgacaaatattgaataagtactatgtgcccagcactgccccagatgctggagttacatcagtaaacacaatagacaaaaatccctgctgtcatggggggattctaatatgggaaagcagacaataaacaaaataaataaaatataagaaatataagatagtaataactgctaaggagaaaaagcaaagagcaggcataaatatcagatgggggttggaactatagatagggtggtcagagaaggcctcccagttccatcatttgacaagtatttattgagcgactactatgtatcaggcactgttatagatgatggtgatatagtaacacaggtaatgaacccttttcttatggaatggacatacctatttgggagccaggtaacctagagttttggtgttaattctcacaaactcattattagactctgaatggctacttcccctctcagccatggtttcttcatctgttaaatggagcagttggacaaagttatgcttgacgtcctctatacttctaaaacttcaggatgcttagtcttttaggcaatcagaaatatgtaagagtgtttgaagaagactttgcagaggagagaaaacttaaatggttttcacaggcatgggggagctatggggtgtgggagatggaaggtaatttcagaagaagaataacatgagctacagcacggaagcaacaatgggagtccagtattcagtgaagagcaagtagctcaaagggttcccattgaagagtagctgagatcattgggtaggcagtagggggtgattgtagagagtcttggttgggaacccactgagggttttgatcagggaatgacacgattatacaatcaaagtggtgttttactgttttatgaagattaacctagcaaatagttaaatcctcaaaattcattatttttcatcagataatatttgaattatgaagatttacagtcatactctgttataagtcactgcctgattctaatattgctatcaaactaatttttaggtcgttttcaagcccttaaaagcctatgatactacctaatttcccctaacactactactacatgcttgaactggtaacatgttactctttttgtgtgtgtgtgtgacagggtctggctctgttgcccaggctggaatgcagtagcatcatctcggctcactgcaacctccacctgccaagctcaagcagttcttctacctcagcctcccaagtagctgggactacaggtgcacaccaccatgcccagctagttttcgtattttctgtagagacagggtctccctgtgttgcccaggctggtctcaaactcctgagctcaagtgatctgcctacttcggcctcccagagtgctgggattaaaggcatgacccactgcacccggcgtgttactcttatgaaggcttgagagagtaatcagaatagaaaattcttagtacttacacttttttgtgtttctggttatcttataaaatatatgttgaatattaggtttatcttcagccatatatataatttaaatagtactcatttcaagtgatgcaaacatctctaagacaaggctcttcccattcgcttgcttggtcagaggtaacacaagggcaatattcttggaaatgatcctcttgttttttaatcagttgaggtatatccacagctcttgtgtgtttgttgctctagaggctgaaagtagaatattcttcctataagcagttactttagaagataatgataaggagttctctgtccaaagagtgggtcatgtagacctagagaaaggtgtgtcataagaaattatgacagatcaaatcctcaaaactcattattttaatggtagtttaaacagaagtgaattatgacctgcaaaacacttaactgtcacgaagtaaaatgagcaaaagtgacagtgatggttaaattaggtggaaagtgattattttccttttattttccaaattctgcataatgttgctaggacatctatttagaaagtggcaactttcttcagagttgttttgaaaaatgaggcacacccagagaaatctttcacagccgctttttgaaggacagccacaaaagcaaaaacacttcaagaactttgggatcatagtaccaaaaatgttgctgggtcacaagggtgataactttcccttttatgaatgtatgattttctccttatttctttttaataaacaggagatggagaactgtcatgggaacattctgatggtgatatcttccggcaacctgccaacagagaagcagtaagtgtgaatagctcaaataattcaacactccacagcatcaggccaagctttcctctcctcgtggctactattctagcaaatccaaaaaaaaggcccgatttctaacaccatttttcttcccttttctcaaagtttttaatgtcatcaccaactggaaaccatttaagtacactgtaaaattggtaactggaggcaggaaatgtgcacaaagaaaccatagccccagccctttgtctaggtcagaagttggtactctttcaggatgacttgccaagtctttatgtgttctctaaggaagctaggtcactcctatcctcaacagtgaggaccttctgtagggttgtaggatacaaccatctttttggtgggatttggtaggtacttcagacatgtccacataaactctttcccaagccttaggctctcagtcatacagttggaaaagaggaaaggtagcagtctggattctcctctcttcagcctggtgatgtctcccttctgttctctgcactaatctcagaataagcctcacaagtaggcatctgtctatgtaagtaatagcatcttttgttcttttgtattttgaaggaatttataaaatagcattcctctctaaaaatatatgtctaagaagctttacactacaaatttcttaaaatctgaaaaggagatgttccgattcaaagaatctatcatacaaaatgcacagtggtgaccattgcacataaataggtgttcatcacatccttgtacaaaaaaagtatgcaaggacattcactgcgttgttgttttcataaaaacaaaacaaatggagacaacctaaatgtctactagggacttggtgtgtacatccaattaatgggacactgtgcagttgttaaaagaatacggtacatctaaatgtagtaaagtgaattgagctccaagatatgttaagtaacaaaacaaggtgcagaatgaaattgtacactatcacttctttatgtaaaaattgtatgtgcatgtatataaatgcatataaaccaatctggaaggtcacataccaacatgtcaggtgtgctaatcttaaaggagtagaagtgggcaggaggaaaggtagattttgactttttactttatattttctgtataatttgatgttttcctataagcatcaattagttttgtaataaaatatatttgattttctaaaaccctagaaaaatctcagcaaggattgaatatgaggcaggagtccagggaattacagggcaagcctgaggatattgagcatgtgaggaagatgttgataggggatgcagtagaatgactcatacaaacatcacagtgctgctgaggctgggcttcctggtcatcacatgggccacttctaacttgcatgctcccagcttgccaacacccaacccaaagcttcagcagtgagatggaaccatttctatttgtcttactctctatcagtattattttctgaacactgctgtttctgaatagttgcagaagaattggggaaaggggtttggagaacagtactctggacatctcaaaaaatcagcatcctgcaagagagggtaggcttccctgtttgctggttaatataaaccctgaggaaagattttctccacccaactctatctgctttatagtaagtgagattccttccagagcctgacaggagatgatgtcagtctcagttttctgtgttgtctgttcctctttttctcagcccctattttttattgtggtaggtagttgagagtggctgaattagtggctgtcaaccagatgtcattctaaaccaaatttagagtttagtcaccttaagctatgtgacttattccctgagaggcccccacactaagcactatggccaccttagcagtcttgctggtaatgccatgaattagcctttcttcttgacttcattttacactgccctcaattccagcccttatctttcagcttcattgacaggcctagtgataggcctggacttaatccagtacttcctgtagcaaaaaaggtcgggtacagaatgtgggcccttgaaatagttattgattttcaaaggagttcaagacctatctttagaaacaaacatttgtgcctggtagaccaaaatggccatatggtttcactttattataaataaatatttccctttgttctaaaagggatagatattgtgggatatgatttgaataataaatagcatctgtagtaatggaaaaatatatacctggcacatagtagtcacccaataaataaacattgaatgaatgggtgtgggaggtggcgtaaaatgtgtgtgatggtggagtggggagggggttcctcattaattttaatgcacaggaatttgtctcaaatcagagataaactcttcaaatttgttgtttgctcttgaccagcctaaaatgagaaaataggagaatcccttctgaatatcctttgcaggcccaacttcctcagggcaagaagaaaaggcagccctaacaacagatttcttatccaggagactgtccttttcgtaaactgttcctatttaccgggaaccagcaaaacctctgttcaacagaaatacagctgactggtttcttttgccaggtggtctgaaaaccatcggcttagcaagttttatgaagtgcacaggaagaggaaccagtggttcaaatatgactcctttgtaaaaacctgaaacagtttttgtttgatttctaagttgtaatttctcatgaattggtcctcgtgccattggtggggagtgtgtctgcgtgtgtgtgtgtgtgtgtgtgtgtgtgtgtgtgtgtgtgtgtgtgtgtgtgtgtgtgtgtgtgtggagtggtgtggtatgtggggaggaagaagtaggtgcagactagaaagccaaaacatgaaagcatgcataattttgttttggacaacagccaagccctgatttttgccccctgtagattacgttgaaatttaccattaaaaaaagtgaaagcgtttgggatagaaacgacatgaaacagataaaaatccatgtctcatttgtactgtcagaacaatggtttgggaaggaaattggcctaagtgtcttccagccagagatagtcctaggttggtagtgattaagatacaatgttttaatggctgtatggattagaatatattctgaagccgctttttaaattaaactttttttattttgagataactatagattcacttgcagttgtagcagaaaatacagagagatcccatattccctttgcccagtttccccaaatggtaacatcttgaaaatctatagtacagtatcacaaacatgagggccctttctggaccctgatgttttcttgtctacaccaataaaactcttatattttagactttagaacatgaaattcttgggggtcctctacaatagtggggatttttcaacactggaaaagaactgttttagagccacctctaaagcctgaaatatttttcagtctttcaagtaagtaaatcaaaaaataccaaaatactgagcaaaataaaagatcatagctatatggtcatttctaactggttttgacccgctctctcaagcaggctagttgcagctaatttttaagataagctccaatttcacttacaacttcagggcgttaataacctttttctcctttgctctgagttacaaggtcagaatggcccctcataagtctctttcatttgtttaggggaggaactctaaaagaaccattacccttaaatcaaaatcacacaccaccaccacccactccagcccccaaacagaaaatcctttatgtcagtgattcccaaccttggcttcaaaccagagtctcttggggagtatataaaatcctaatgcccaggccttcccccaaaccacttacataaggatacctcagagcgggacccaggtatgagtattttttacagctcaccgggtgattttagtgtatagccaaagtggagtatgtggtatatgtggttgtgaacattgtagctgaatgaacttttgtatctgaaagaacttctctttgcaccagcttttagtcaaatggttatagaccactgagtttgattggacattctttcttccactttctccttcttctccttctcttcctccttctattcatcttccccctactcctacactcctaccatctccaaaaactcaatcttcattatcaccatgagtaaactgcctctcctccttggcctcagtttctctgtctgtaaaacaaaagacttcaacaagattaggttctgggggactgactggtctacaatagggcctgtgatcaaaattcttgaggattttgttttttcatcatgatcattttcctaccattattatatgtcccaggtctgagacgttggtgctaaagaatggcttttcattttgtgttcaccatcatgagtcagagaacttctcgtacttgcagcttatcctgggtcaacaaccttccctctctaattctatcccagtccaactgcttctttttaggatcagtgggacaccaaccagccaaactgtcctctatgtgttcctttggcaaaactttgccaaacttcaaaaaggacagagcaacctataatggcctttgtggaatgtgagtgattatggcagaaaaggacatatgagccattgtgggaatgagaaatatttgaactgagaatcctatccatgtgcatgaaaacaaactgatgcaaatttttatttgtgtgaattttgatagcaatgcaccaacataggctcttcttagatagaataacattgtctttcaaaaggctaaaaaaggtcctcttacttcagctcctgtttactctccctttcccctaccagtggccccttcctgccaagagggcaataatacttcccaaagtgaaatttgcaacatgcctgtctgtggcccataactttaaacagtgttttatgggatatggtcaggggaccccataactatcttcccaaggttcctcactatttctgtcactgaatataaagaccttccttttcaattgcctgtgaaagagttttttaatgggttccccctccttcacccctaacaattgcctataaaatacaattaatcttacttggctttaagccttaaggttccattcttcattcatttcatcttcttgtacccccagcctactttagctcctgggagaggggtgggtagcacaatagtctggtcatcacgtgtgttgaacccttgctgaaagattacttgtatgacaagactctaagcttttcttaggtaccagagttttgttcactcaacaagtatttgatgaacaccttctagatgcctgacactaaaatctaggcactggagatatagcagtgaacaaaaagtccttgatttcgtagagcttacatgccaatactgtcatgtactatcaattcttctacctataaaatacctagggtatttgtactgcattgtatgatcttatgccattacctgtctttagagtctaagtacatcttatcaagactatactcgaatctcatcttttcctcctatccagttcaccctatgcatgatcaggattcaatgctttgaaacagttctgattacattatttctctaactttaaaaaaaaaaatccctcaaagccttctatgccctcacctctattgcttaccaaataaagtcttcaccccttagcctgtcatttaaagtcttccatgatctggcttcaacccacttttggaatgttattctgcaactgttcccttttatggactcgatgttctcttcttcaccttctcaacttgtaaacctctgcctggactattccacttaacttctgcctgtaaaaaagtctacccatccttcgtggcccaggtcacaagccctccccaactagaagctctctctttctccttctgatttgcacaggactgcttacttcttctgcagcctctattcacattctgccttgcgtgcagactactgtcttaactcttaaactgaaatgtgagagtcttggcagcaggaaggacgctttagcctttttggctcttttctccctgagaagtttgcctgtaaatctagtcctatcttttagaagaagagagataaaccttggcaagttgtcattaaaaaaaaattttaatgaaaaaaatgtcagctgcttgtacatgaccacatccctatttctattggtgtaggtaagcatgcagctgaaatcagagctcaccactataaatcaaaattattgaatgacttctagtatataacttaatctctgtgatctcattggtggcttttggactaaatttgttcttgttattttacagagacattcttaccaccgctctcactatgatcctccaccaagccgacaggctggaggtctgtcccgctttcctggggccagaagtcaccggggagctcttatggattcccagcaagcatcaggaaccattgtgcaaattgtcatcaataacaaacacaagcatggacaaggtaaggggcatccttcttttgtatacttccacaacaaggcttcagcagccctggtctttgcagggctggagctgggaaaggaccctttctcccaggaatagcccatattcacttgtggctcacttagcatcaagtctgtgggtatagtcaggtgactccaggagactctttggacttccttaaatgcagccaaaagagcatagtccggtcccttttgtaaacagcctcttgtattttctcaattatccctggggattgtaggtcatttgggaaaatttcttgggtctttaacagaatgagtgattgtctgtgttttagtaggggacccaacattcaaaggtactcagtgccaaacatcactgaagctcttatctataccttagaaatagcaattctcacacctcaatgcaccccagattaccctggggctctcgttaaagatacatattcctagccccacactcagattctggttaaatgtgtagcatatgagactatccttagaaacgagtaatccaggtgcagtggctcatgcctcacagcactttgggaggtcgaggcaggaggatcactcgaggccaggggttcaaaccaggctgggcaacataataagactctacaaaaaaaaatttaatgaaaaaatattagccaagtatggtagtgagtgcctgtagtcctagctacttgggaggctaagacaggaggatcacttgagcccaggagttcagggttacagtgagctatgattgtgccattacactccatcctgggggacaaagtaagaccctatctctaaattaaaaattttaaaaaggaaaaagagtaatccagtgagaaatcccaaaaccacctggctgagcaccaggaagactgatcaggttaagactgacatgctgtccacttagttgatcaactggctacagcaggcacccatagacttccatagcttccaatgtcttcttacacagcattttctggcctccacccgccccctgcccccacccccacacacaccagtagcaggagtcagggaggagaaactcaatcaaacaattgactgcttcttacttttttaggcctcctgtcaaccagctcgttggagcaagggctcagctgtttccttttatgaaaccacaaacatgttttgtttcgtttaaagggaaaacaaatcaaaagcagttttctgaatgggttaaaagtaataaattattaaaccaaatgattgaataacatgggtgaaaaacaatccgttacaaagaactcctaccataaatctcaacaaagctagtcaagccaaagctagttgatcacatctgttactagttagatgtatatttcagattacagataaaaaaattaaattgcttttgaaatttgcaggcttaaaaaaacattcgaaataaaaccattaatggaaaatggtgatgtagtagaagaattggaaatacttactatcgatctgtgtttgatttgtattttattatttttaagttccaaggatttctgataaaagcttatgaaatcaggaagaaaggtaaagatagcttgattttcaattctaaattgcctccaatagattccatttgctgtgaaagtatttcaaagccttttaaaagtgtagggaaatggattttgaaaatcctaaatcccataatttccacaaggtctctttaatttcagggcagaggctcatcccttgattttctccatgtcctacaaaaaccccagctggtttacatttattcatttgcccccactgatttggatgcaacagttctgttctgacctttctaatatagctcactgaggaatcacttgtccccacccccaactcccaagctggatgattcaaaatcatctcgataatttttggggtaaggagagggctatgtttccctgtccagaattaacttcaccccattccactgcagagtctcatccagtctagactattcctttagtccaaatgttcaggggagatggagcctagctatataacactgggaatcctgcctgccctgctcatcatggatcgttcttttccttacatctcttgctaataatgtggtcctctgatatatctacttggctccttgttagcatcaaataagagaaatgataggaatccaccattttgaacttgaatccagcctaaattttcttgaagcatactgtgtgtccacttgatcacattgtctagaagggaacgttactgtttggggagaaaaaaaaaaaaagaggtaagggcaggagagtgaacagcacatctggcctgtcttgtgtgatcctgtccacagccctgacctcacagttgaggtgtcagctctccattttgtctcattgtaacattgtgagccactccagtttaggttattggaaatctttacgtgggttgaccagttagagtgtccagtattctagcagctcttgcaaaggacaggaaaaggcagctaacattattcttatttcttaatgtgactcagtggacttgatgagaaagaactagcccagtgattcatccttctgaggccattgtcttgcagccaaatcagccaattcctagaaatgcatcaagtgggactatttctccccaacagcccagcctgaagtgatacaacccaccctagagatgttgttgattgggatgccaacaggtttccctgggtgtgatgaggtgatgggaataataagaaacacacccagtcctagtcatgacttgaaatctccacaatgtctcagcactctcaaaaagggagataactcatcctcggacttccccatctgcagccttgtgcagttatcttggagcctagctccatgccttatagtaggagccagatatatttggtgttgatttgcatagaaagatactcctgtggccccttccctttataggcccctcagcctgcatcctagatgcttgctccttttttgggtgggtctggggagggaacagggtctcactctgtcacccaggctggggtgtaatggcgccatcacggcttactgcagcctcgacttcccgggcccaagtgatcctcccacctcagcctcccaagtagctaggactacaggcatgcactaccacacctggcgactttcgtattattatttttgtagagactggggtctccctttgtttgccagctggtcttgaactcttgggctcaaaggatcttcctgcctcggcctcccaaagtgttgggattacaggcaggagccaccacacccagccagatgcttgctcttttaaggtccttcagaagacatggggccaatgacttaacttcccacttaacaaatgtcagactgccaaaggatatctgtgaagcaagcagtgatcagctgtagccaaatatctatagccagtatgaggtgggagactgaggaaattgcctgaaattagaggcataaaaggctatcccttcacaagttacccaggagggcttggtcctttccctctcaatcttgacttatcactttccttcctacaccaaacagtgccgaacaccattaagctccatacttatatatgttggtggatcagacagactcatagcatttgacattctgaatggatttgcttcaggatccggaagaaactgtccctttgggaagagcagtaatttttgcatctagcctccatggaaagcaaatctcccaaggaaattttcatgcctggaagcacatccacttgaggcatacaaattttctatagaactgaaaatattaacattacattctactagagatagaactctgctttcatgcattcatttattctcatatatatatatgagaatatatatatatgtggctgggcgcagtggctcgcgcctgtaatccaagcactttgggaggccgaggcaggcggatcacgaggtcaggagatcgagaccatcctggctaacacagtgaaaccccgtctctactaaaaatccaaaaaaaagttagccgggcgtggtggcgggcacctgtagtcccagctactctggaggctgaggcaggagaatggcgtgaacttgggaggcggagcttgcagtgagccgagatagcgccactgcactccagtctgggcgacagagcgagactccatctcaaaaaaaaaatatatatatatatagatatatatagatatacagatatatagatatatatagatatatagatatatatagatatatagatatatatagatatatagatatatatagatatatagatatatatagatatatagatatatatagatatatagatatatatagatatatagatatatagatatatatagatatatagatatatatagatatatagatatatatagatatatagatatatagatatatatagatatatagatgtatagatatatatagatatatagatatatatagatatatagatatatagatatatatagatatatagatatatatagatatatatatagatatatagatatatagatatatagatatatagatatatagatatatagatgatatatagatatatatagatatatagatatatagatatatagatatatagatatatatagatatatagatatatagatatatagatatatatagatatatagatatatagagatatagagatatatagatagatatatagagatatagatatatagatatatagagatatagatatatagatatatagatatatatagatatatagatatatatagatatatagatatatagatatatatagatatatagatatatataggctgggtgcggtggctcatgcctgtaatctcagcactttaggaggctgaggcaagtggatctcttgagtcttagagtttcagaccagcctgggcaacatagggagaccccatctctacaaaaattaaaaaaaaaaaaaaaagcacggcatggtggtgcatgttagtcccagctactcgggtggctgatgtagaaggattgcctgagcccgggaagtcaaggctacagtgagccacaatcacaccactgcaacctgggtgacagagcaagatccggtcttaaaatatatatatatatatatatatatatatatatatatatatacatatatatatttatggactgcctactatgtctgaggccatttataagcatccagaagctgctgctgaagaatctggagaagctcctgagagtagaatatggcccaagctgttttttggtcacagatactactcggtaaacatagccccatggctatgacaagaacaaaggatgcttgatatgttaagtagttcagggcttgggttctgaatatagggttccattttagctccttagcttttaattgctaattctgcattctctttcagtgtgtgtttccaatggaaagacctattctcatggcgagtcctggcacccaaacctccgggcatttggcattgtggagtgtgtgctatgtacttgtaatgtcaccaagcaagagtgtaagaaaatccactgccccaatcgatacccctgcaagtatcctcaaaaaatagacggaaaatgctgcaaggtgtgtccaggtaaaaaagcaaaaggtgcgttggttggaggccctgcttttggttgactgagattctcacctagtctttctaaactttctttaggcatcagaaacataacctttcatataattgtaatgataatatttctaataataatgaatttcattctctcttctcttgaaagactgaaaaggcagttgcttggaagaaatttactacccagaaatatgcttgtgtctaccacacctctcatgtatccctgagtgttgaacttacctatgcttttctaaatagtagagaatttaggctatcatgatgataaggaagaatagtagcagctttcatttatatcactattaaacccatcaaagtacaatcacatccattgcccttttaagacaggacgagaggcaggtgagttatagtggaaggagaccaggttctgatccaagcctaagatgttgagtgatcttggaaatgtgccatatccattctgagcctcatcagccttatctgtacaattgaaagtttagaaaaattatctctaagctcccttctaacactataatcctataattatattattatttattttttaaagataagaaaattgaagtacaaaaatcaaaggacttgcccagattcattcaactaatcaatcataaaaccaaggcctataacccaagtcacttccagcccatcgttttttctatgccagtagaaaatattgactgataaaaaagacaagttaattatttaaatggtagtttttaaaacatgagctaaataaaaatatagtccctaatattggggttgacagaatataggatgggtaatcaagcattctatctctgtcttgccacaggtttcctgtgtgatctataacaagtcacttcacccctctgagcttcagtttccttctttgcagaatgagagggttagagtagattttttggggggcccttacagctccaacattcgaagagtcgatgatttagtcaatcccaggcacatgaatttatcatttcttatgcttctgcaaagcatttttataaacacagatgaaaattcaaacattttaaaaagtaggtagagagctaaattatatacttcttcaacttagtccctcatgactagtaggcaaacatgccctgaatcaatgtgtatttattgagcattttcctgcaggccagtggtactcaaacttgtctgaacattagaaccccttggcgagcttctacatatacctgtgtcccatccccagagactataatttaattgatttgaggtgtggcctgggctgtggcatttttaaaagatccccaggtgaacattgtgtgcagaaaagtttgagaactactgctgtaggcccagggtcatttatggtcttgctactcaaagtgtggtttatggactggcaacagctaggagctggttaaaaatgttgactctcaggcccccactcaagacctactgcatcataatctgcattttaacaagaacctcaggtgattctaatgcacattacagcttgagaagcactgatttatgacacaaaatcttcctcaatgtaacaacccccatcttccagagtacacagggggcagcgtgtggacaggaaggacaggagctatttgataaggtgtagagaactggggcattgaaatttatgagaaaatgtatttattacgaatacagagagaacacattctttttatttttttttttattttttgtttttttgagacagagtctagctctgtcgcccaggctggagtgcagtggcatgatctcggctcactgcaaccttgcaacctccacctcccggttcaagttattctcccgcctcagcctcccgagtagctgggactataggcacgcaccaccacacccagctattcaaactcctgagctcaagtgacccactcgcctcagcctcccaaagtgctgggattacaagcgtgagccactgtatccggccaatggagagagcacattctaaggatgatatggacatccgggccacccagcaacaatgacctattatgacttccaagtctgtggtctcactggatcctcaaaccttttagtatcacatagtggtagtttcatgaacacaattttctcttctgtcaggggtctaacacttaatagtttaaaaagtaatgcaacaagataatttcagacaaaaactaatatttacacaaattacccatgataacataaaccctctcattgtataatattccaatttgaatctcaggccttcagaccaagtcttatttcattgtgtgcttaaaattttattgatgcagatgattcaattaaaaaattaaataatcaaaaagctgtgagaacaagacaaacaacagtcattgcttttaaaacaattgtcctctcaggttggtaatgtttattaaaacatttggtggccgggtgcagtgactcacacctgtaataccagcattttgggtggccaaggcaggaagatctcttgagcccaggagtttgagaccagcctgggcaatgtgatgagacctccatctctacaaaaataaaagaaaattagccaggtatggtggcacgtacctcctgtagtcccagctacttgggaggctgagggctgaagtgagaggatcattgcctgggagcaatggctgcagcgagccacgatcacaccagtactttccagcctggaacagagcgagaccctatctcaaaaaaaaaaaaaaaaaaaaaattggctaaaaaattccacttctaggaatcctaagaaagtaaccacagacatgcacaaagatatacaaataagaatttttgctgcaatgctgtttacaatactgaaaaattggaaataatctgaaagttcacgaatatgggaatgattaaacaaattatggtgtatctgtaccgtggaatattaatatagccattaaaactcattatagaccaagattgaatggcagagaaagatgtttgcaatgtatttgttaagtaaaaatagcaagctaaagaacaatatgtatattatgatccaactttttgtgttaaaaaagaaagcgttgaccaggtgcggtggcccatgcttgtaatcccagcactttgggagtccgaggcggacagattgcttgagcccaggagttcaagaccagcctggacaacatggcaaaaccatgtctctaccaaaaatacaaaaattagccaggtgtggtggcatgtgcccatagtcccaactactcctacttgggaggctgaggtgggaggatgggttgagcccgggaggtggaggttgcagtgagccaagatcgcgccattgcactctggcctgggcaacagccagaccctgtctcaaaaaaagaaagaaagaaagtgtttatatatgctaagacaaaaaaaagaaacaaaaagactggaggagcatacggcaaaatgttaacagtgaccattttcttgtgactgaattatgggtaactcttattttcttatttatttatttgtattttccaaattttctatagtaaatatgtgttacttttgtatttagaaaacataataaaatttatcatgtaaaaaactgccctccagtatcccagttggcagtatattgaagtctgaatgattaaaccgatttttctggaagagctgcttttcccactttcccactctgctcaagtttgtggagatagacgattgattgagcaacatggaagaagagaatttctgtctcattctgtgtatctgcctctcagtgagccagacatgggtgtctgcatgttgaatcactccttagtcacattgcctgagagtcaatagccacatagccaagggcacctgctccaggtactctgcaactgcagagcatcaggaggcatgcacttgctcatgcattcaatctggaaatttgttttaagtacctactgtgtgcaagacacggttacatgcactgaggacagagatgtgaacaagacaaaggctacttgccagcatgctctttacattctagcagaaaagaaagacagtgaacccaaatcaataaggtaattttagattgtgatgagtgctgtgaagaaaaaccaaacaggatcaagagagagtgaatggggcaggaagcacttttaaaggagtagtcagggaaggcttctctaaagatatttgaatagagtcctgaatgacgtgaaggggtgagaaatgggatgatcatgacattactggcctcttaaaaaatgacacatgacacagaagaaaaggaacaaggcagtgaggagagaagtagatggaaggaagaaagaatggtaaattcagttatgttgaaaagggaaaagagataaataaaattcactgataatccagccaaaagtttcattgtaacaagtgattgcagcctcctacaataacaaactaggaccaatattaaagatgtgagtttcatctctctcttccctttgctctggtagaggctgaccttgctttgcatatcaatggccacctacagggttgggtaagatgtccacttcctgaagattccccaactcacttctcacactgtcgtgccaaactcctattaacctcagtagggaaggcaccagatttaagaggccgaagaaaagatccagagccagcaaacaagacatggggttttattaggggctgacatacaggggagagagtccagtggaggtgggctggacaggagaaccaccttacatatagaaacagtccagtggcagcaggttgggcaggaaaactgcaaccacttgcaaacatcatgcagtttatatagcattttcactgaacactctccccttaacgacctggcaaccttcatctaacccaaaactcaaggcctctatcccctgtgcagccccagggatgagcctggggttcagatggtcctcacagacaaggaaataatctcccagttggccacgcctggattcccaagctcagaacacacattcagatacgtctgccatacagggtcattctaagggtacacttaagttattgctatcatgagcatttactgtacatacaaccacaataccatcccaataccttgaatttccataattacatactccttttaggttatggcattaaaagtccctattaagacttaaaagttgtcccagctggaataatacttctccttcattaccacttctgcaaggaattctggaaggctcaggatgggaacattctcttgggctgtggaaatggccagaaatgacatcaagcacattgtcttccccaaaagaaaatgagagtaggtgaactatagtgatcagaaagcaccttgaagtgcagagtgtgaaaaacggcggatgttgctaagtaggtagttctaaagacaaactttgcttttcttagcattttcaagtaccagccagagttaagtcaataatgagttttgttgtttgtagatcccttcggtcaagtaaattaagctcttgtagggaaggaggtagtggtgcaagatgactcttcaggctactggaagaacttttagcatattacaggtactgccagtgccatcatggatttcatgtcagctatagctgtagccaatattaagctggtgagcaaagtttgagaaatgaatttggctgtcattctaaaggtgataattgaatacacagaagtctctgtacactcagtgacctcttccctctctccaacccatttaaaaagtgctagcacgtggcccttaattacctatcaccaaaaagactggcccaccaagtaaataaatagctaaaaagaaggacaaaaggaggaaaacaaaaagcttgattccacaataatccacaaattgagtaattcagtctggaatcaagagaagactatggttttgtccttacaatgccaaatggtggtgggggtgggaaagctaatcaggttaccaagagacatacaatagcaatttgattacaacttctagtccaaatgtgtctgattggctaacagtgagtctccctaattagagtcacagatccaaagcactcaacactcagtggtttcatcctcaacaattcagatattcttacagatggcttctgttgttctgatttgagtgtatgctttaagtacgcagttcaagagagtactgattacaaggccagcaagcaaacttaactcactgataaccaacaagaagaaactttttaaaacaggggactgaggaaagaggagggagggtggagtgaaatgtagagcttgtgcctttatgcctgcgagctgaaattcaacagtttagtttacacattaaatgatccatcgctgagggacttgaccaattttttgtgtctcccaaccattcatttggcatagcatacatatggctaatctgacatctagattttggcactggtgctgatccggtattattgttccccttacaaacaaatcaaagagcattcagaaatgtcaagccaatttggatggatcctttgggcaagtatatgcacataaatgagtgtcatgaatgttttctaagtataccaaaatgatgtcaggggatgttaaccaaggccctttttcagcccattccctgggcctctcctggcaacactgagctggacagagcatgatcctgaccctgtatggaaattcctatgttctcttaagtgcctaggagatttgtacctggctacatttttcctcatgaaagtccacttctcagtgacagtagtaggggtctagtgttccgaagaactatggattctgtcaacacatggacttcaatcaaagttacgtgctcctttgtgatttgtggcttaatctgtggcttgttgcagtggcagcctaagctgggctaatgaagtatgggtggaatttctgtctctcgaagaatgttcttgttaattgtccacttttgataagtgtgagatgttatgaacaatgagatacataaatgcagaagttcacttctagctttagaaaaccatgacaaaattctacttgcttcctgattccagaagaacttccaggccaaagctttgacaataaaggctacttctgcggggaagaaacgatgcctgtgtatgagtctgtattcatggaggatggggagacaaccagaaaaatagcactggagactgagagaccacctcaggtagaggtccacgtttggactattcgaaagggtgagcaagacaacattaatttctcatctttgtaagggggcacagaaaaggatgagaggactcactttaattttgcttcaacctgttccctcatttggattaaaagttctttttgattgcttagaaactgacatatctaacactattgtcattatggcctttcaaatttaacgatggcctgtgctaaagatcaagtactgacccttgggtttccaaagctgcctatttcacaccaccaaaagctggagaagcggttctcaaccctggctgcccatcagaatcatcagggagagttttggtttcctttaaataccaaatatctgggccctacccccagagattctgattagttggtctggagtggggcatgggcatcagtgtttgttcataatgcttctcaggtgattgtaatatgtagccaggattacaaactgtcaaactgtagtctgtcattctttccagaataaagctcaacaaccatgaaaacccattcattcagggcaaagctaagtccctaatatcacgatgtgtcttctggggtaaaacaaatttaaaacatcatccctgccctcaagaaggttatagtcttactggagaaaccccagtcacaatgttcaattccttttctgattactcacagtgactaccacagcaagccacattctgttcattgtgatcctacagctcttctaactttttgtaggctcaagactagtgcttatttagtgtggtcaaggttcctcacaatccaagtggataagtgagatttcagctggaaaatatacacatctttttgctattggctctcacataaggctcaagagtactcgaacttctgtatgcatcaccattacacagggagctggttttaaatgcagatacctggccccatcccagagataggaattcagtagaccttgggtagagtccaaacatttgagtgtttaacaaatagccagatgattctaatgcaggtggcacttggaccatgctttgaaaaagactgctcagtatttatgaggctttttttctctccctttagacaacagcctttatctaaagaatgcatttctccctaaaaaaaagatgcttgaacatgtatatattcactcatgcttatttttggtctatgccttggagtgttgatttgccatctttaactccctagctcatccataacaggacacctaggactaggcactggtttgttgcgtttccccagcagtgggcccactattcgtcatcccacatctttcgcctctcagaggtgtgcagatgaatttcaacttgctaatgtagcgtctaaatatcctcttgttcacagttctgggttatcaaggtctatgcttggtggacacagaaaaagaggcttaatctacttcgcccatttaagtgggctggtaatatgttgctccttcagtataaggcagttgtcagttgtctacctgttattgtgataaaagctattcaggcaaggttgagactgtggagagcactctattttaactctccccatttatgaataaggaaggctaaaggatctgtgaatatttcccaaaggaaaatatgcttttcagtgagttcaagaacaagggtggcttctccatttacaaaaccaacctgcctgcaatcccactgcaggctctcagtgcttagccaggagggcagcccagcggtttggcatggacacagtctatccaggttgggggcaagtgcagaatttctaatactgcctatggctgcagaagctccagtaagcacttatgctagattccatgtggctttccctaggagagagtcccatggtcagcagcactatctcccttatctccatccactggagaagccgaggggaagccagtaagccaaggaaacaaatggagtcaattataacccttgagccatccaagttcctggttaagcacattacacagcccaactcgatactcttaagccctagtaatgaaatgatatgctgagcctgagcagaaaaaaaggagttgatggttccagattgagtgcctgaccatttgctccactttttgcttggccctaggcattctccagcacttccatattgagaagatctccaagaggatgtttgaggagcttcctcacttcaagctggtgaccagaacaaccctgagtaagtagtacttctcttgactgctccctgaaaaacacattcagttttcaatttagcatagccacagctaaagtccctccgcaatctcagtgaacattagcactgctcagtatcaacactaaaggatgttccatctctcttctgggtgacttagcagtgaatggggtgtctgaatgtaatctgaagagcttggacatggtgaatacaaacccagatgtagtctgagcataggatacctcaggtcaaggcttcctgaatgtctttaatgaaactgctaagcacagagtctcaagagggttggagaaagctcataagattccaggtctggtatatttatggagacttcacatctggaagggtgtatcctctggtggtgggtatgagaggcaaagagaaattaaaggcatatcaattcctgtgttatatgaaagcacttttactcctggggaactgcccctgggtggtcatgtttccttaaaagcattcaggcactcaaaaacacttgcagctctcccactttccacactagatggagcctagggactaagatacttctaggcattggggcgggtgttgagcacttctaatgggataaaaggcacacagtttctatccacagggaattataatggatgagacagaacatgaaaatgacttcagtatgaattagtatagttctgaggagttaaatatcaaagtgctcaggggaatctgcaaagaacaatgagatgagagccaggtgggcttagtcggggaaggcttcggggaggaggtgtgttttgaaagagaagggtatgactgggcaatgggtcaggaaatcagtccaggaaaagagtgcagcctaagagaagactcagacaggagcaaacaggaaatgtgggtaggggagaggaatgatcacaaaggccacagaaggtgcactaaaagattagaagatttggaggtagaaagtagtcatagggcctgaaaaaaagccagtaaaatgttcaaatgtaaggcaagtagcatctgtagttgctgcaaatagcatagagatatcaacatggtgctttggaaagatgtctttcggctatcagatgcatatattacattaagcacacactttgacgaagccagattatgaagtgcccaatttatcatgctaggacattggacttgatctccaggccagagaatgccagtggaggtttttaagcaagtgaatggtgcattcagatctgctttatttatttttttatttttttagaaagaggtcctcgctgtgtggagtgaaaggtggacccttattaagagaagtgggatagtctgaattaggaactaattatactatattaaatcaatgagacgggaggagacgtcactgtgagaaacatttctgaggttaaatcaacaagatcagcatcaaagagagaaacgagtttggaatgggtccgatattaataactcgactgggtgaatagtaataccattcaccaacagggaaactgtgaagaataagcaggtattggtgaaaaagagtttcacttggaacatgtttaaattaatatgcttaagagccatctgagcagagttagggtccaataggcagctagaaaaagagccaaggcagtcagttgcttgtctttggcaggactcatagaaaataacaggacagtatgagaattcaaatggaaaagttgggagtccttacatgtgagtaagaaaggaggcagagtgtaagatcctaggatcaattatgggacttctgaagttacatgttttagttcatactgtgaacaaggctttgttctaggttccaggggacttaaaagatgatttagatatactctgtgcccatggcaggatttggggtatataatggagtagaaggtatgtgcctcaaactgtgtgtagctgaaagaagttggtatgatcctacagggtcacctaggagcaaagaagaacaaacccaactcttttatataatgtgcctagcagagcccagcacattatagggcttcagtaatagctggttccttgcccaaatcctcttcttgtttttttgtttttccttctatcttcccattgagtcatagagaatggggaaaagggagaaatccaagggagaaaggagcagagaaatcaggcccatagggaaggtgggtcattattctcttgtggctaaggaaaagaaaaagaggttcaagacaggtttgggcttaagaggagttggcttaacttggactaggagttctccaggttgcagtaccatgagcacaggaataaaaagaagacaaaacacagtatccagggtgggcagagacaacaggggatggaagggctacagccaagtttactctgcgtggaaagggattccatggggtatatgagaatggatgaggaaccatgggaagggatttagggtgctaagggggtataaggacagcatgtggacgtaggagaaagcaacgtcgagaagtttttaacaaaagatagcaggaatagaggaaagagtgatatataatcaaatagtaatcaagtaacccaaaccaatatttggggaccctaagggtaagcaaagccccagtaatacagtaggtgccgttttccaaagtgcctttttgacctggtgccaagtaagctgcctaaatagctaacaagcagatattgaagcattttgtaaatgctaaatatactgtaaaaattccaagaataacacttaggttttgctcttgaggaggggcagttctatattattcttgggattcttacaaatgctatgtgttgaaatgaaaacttcatttcccattttccatatctgctactagaaaagtgttttggggccattttttgaaaccaagtgatatttgtattccaaattccctggtaggtccatgagtaagtgggtaagcatggggtatattggttctattcctaatttgctctgctttcctcttacacactcccggccactttgcgtttgtttgccttttaggccagtggaagatcttcaccgaaggagaagctcagatcagccagatgtgttcaagtcgtgtatgcagaacagagcttgaagatttagtcaaggttttgtacctggagagatctgaaaagggccactgttaggcaagacagacagtattggatagggtaaagcaagaaaactcaagctgcagctggactgcaggcttattttgcttaagtcaacagtgccctaaaactccaaactcaaatgcagtcaattattcacgccatgcacagcataatttgctcctttgtgtggagtggtgtgtcagcccttgaacatctcctccaaagagactagaagagtcttaaattatatgtgggaggaggagggatagaacatcacaacactgctctagtttcttggagaatcacatttctttacaggttaaagacaaacaagaccccagggtttttatctagaaagttattcaagtgaaagaaagagaagggaattgcttagtaggagttctgcagtatagaacaattacttgtatgaaattatacctttgaattttagaatgtcatgtgttcttttaaaaaaattagctccccatcctccctcctcactccctccctccctccttctctctctctctctctctccctccctctctcacagacacacacacacacacacacacacacacacacacgcacgtccacactcacattaaacgaaagctttatttgaagcaaagctagccaagattctacgttacttttcccttgactggatcccaagtagcttggaagtttttgtgcccaggagagtaaataactgtgaacaagaggctctgcccttaggtctttgtggctgtttaagtcaccaacaatagagtcagggtaaagaataaaaacactttcatagcctcattcattcacttagaagtggtaataatttttccctaatgataccacttttcttttccccctgtacctatgggacttccagaaagaagttaaattgagtaaaatcatcagaaactgaatccatgtaagaaaaaataattgttgaagaaagaagttgatagaattcaaaaaggccatctttttgctttcacatcaataaaatttaccaagtaatagatcagtactcactaatatttttgagaccatagttgtctggtcagaaaaattatattaaattagtaaattctagaagctctttaaaagggaagttttccttcttctccaattataggagttgatttttactttgcaaagtggctcggtcctcatgagcatctgcatgttgactcttcagttaagaaaattgttgttcatttagggaggtggatattctgatgaagatctttatcctaaaccttcctactatccttgtcttattcatcaagcagatattttagtcaagaattccagagaaggctgctcctaaaatgtctacttgcagcccaataccagagcataaactatccattctggggtctggctttagaaatcatctttgtgggaagacctaattcttcacagcaaggatctcaggcatgccttctagatttgttccctctgaggggcaggaatgaactgtagaaatgttttaaggacccagaaaccccatatgtctcattccatgactataggtgagagaattctttcctaagagggtttgataccaataggggaaaatgtaaaatgttcagtctttatgacaacctggcataaaggagtcaattcttatgaaagagacacaagggccttatggccagggtttcttgggacaagactctcaccagcacatcacacacgttctccttggaagagagaagcagtacatcccggttgagaggtcacaaagcattagtttgtgtgtgtgtgtgtgtgtgtgtgtgtgtgtgtgtgtgtgtgtgtgtggtaaaggggggaaggtgttatgcggctgctccctccgtcccagaggtggcagtgattccataatgtggagactagtaactagatcctaaggcaaagaggtgtttctccttctggatgattcatcccaaagccttcccacccaggtgttctctgaaagcttagccttaagagaacacgcagagagtttccctagatatactcctgcctccaggtgctgggacacacctttgcaaaatgctgtgggaagcaggagctggggagctgtgttaagtcaaagtagaaaccctccagtgtttggtgttgtgtagagaataggacatagggtaaagaggccaagctgcctgtagttagtagagaagaatggatgtggttcttcttgtgtatttatttgtatcataaacacttggaacaacaaagaccataagcatcatttagcagttgtagccattttctagttaactcatgtaaacaagtaagagtaacataacagtattaccctttcactgttctcacaggacatgtacctaattatggtacttatttatgtagtcactgtatttctggatttttaaattaataaaaaagttaattttgaaaaatca

SEQ ID NO: 151 - DNA, 15504 bp, Homo sapiens
tctctctcgcacacatacccacacacacacacacacacacacacgcgcgcgcgaaaacaatatctcatttcttcttcagggagcagctgtgaaggaaatcgggggaggaggatggacacaacatcccatctttgtgtttcgatacagactaagcttttaggccaaccctcctgactggatgggggcggcgggcgtggcatgcatgaaaagtaaacatcagagacctgaagaagcttataaaatagcttgggagaggccagtcaccaagacaggcatctcaaatcggctgattctgcatctggaaactgccttcatcttgaaagaaaaggtatgtactgtagttttaagcttttcatttatgataataatgtctaaaatagaaacagtctagactctccattgccccatttcagctacatataactaccactgattgagagcttgtgccggtagctttagacttgttctcatttttcctcaaacaaatgtacaaggtaggtatcatcagagccatttttccagtgataaagctgaggttcagatacactagcaacatgcctaagataaaaccaaacccagtgtgaactcatcccagcgtcttttgcttacccctccaaactggacaacgaggtgtttccatgcacaaacaccgtcctaggtgaattctcagcaagctgtccaacggtgcatcgcagtaaaataatctggaaactggaattaatggtgtgactagaaaatgcatttgacaatatggcataaaatattgtgtttgggagatacgtgtcttgttatatttaatggctaaatgagtctttgagacctaatgacttattggaacctattttattttatgaggtgaaatttcaaaatctagtccttcacgttctgcagatctttgaggtcaggggctgtgtccccaggcactaagagcgcgggcttgtgggagacctaggcttacattctagcctgtccccaggcctaggcttacactgtggcttcgtagtttaccaggaagtaacccgggcaaattcacctcgttggtatgaagagagtgtcagcagaggtcgcctccagaggaggtgctgtggagactgagcgcatagcacccttaaaatcctgggaccagggcttctccacgggtaagcttaatgcaagtggagcagtgatttccagctagtgccaggcccaaggtggatgcactgtcaccttagttggattgctttttaattacctcatattctgttaaaaatcatatttctttttttttttttttgagacggagtctcactctgtcacccaggctggagtgcagtggcgcgatctcggctcactacagcctccgcctcccaggttcaagccattcttgtgcctcagcctcccaagtagctgggattacaggactgcaccaccatgcccagctaatttttgtattttttgtttgtttgtttttgttttgtttttttgagatggagtttttgctctgttgcccaagctagagtgcaatggtgtgatcttggcttactgcaacctctgcctcccatgttcaagcaattatcctgcatcagcctcccgagtagctgtgattacaggtacttgccaccacacctggctaattttttgtatttttagtagagacggggtttcgccatgttggccaggctggtctcaaactcctaacctcaagtgatctgcccacctcggcctcccaaagtgttgggattacaggcattagccatcatgcccggccaaaaataatatttaaattatacttattttgtaaagtatttaaactcctcataagaacaatcttcctattgatatcagaagaagatgcaaaaatatatgtcgtatataatccatatgttacccaaagtcttaagtacacattaataacatgctcaataagtaatgagtaaattagaatgaaaggacattgaaaactataatggatgctgtccgccctttctctcacaaggagtttttttgttgttgttgtttgtttgcttgttttgagacggagttttgctcttgttgcccaggctggagtgcaatgatgcaatctcagctcaccacaacctccacctcccgggttcaagcaattctcctgcctcagcctcccgattacaggcatgcatgtaattacaggcagcatgggattacaggcatgcaccaccatgcccagctaatttttttatttttagtagagatagggtttctccatgttggtcaggctggtcttgaactcccaacctcaggtgctccacctgcctcggcctcccatgggattacaggcttgagccaccgcacctggcatcacaaggagttttaaccacaggaataaaactaatgtaaccaagaggcatctttggaagagggtcagtcaaaggggttgttctgaaatcctcctactgaggtaaagaatctgtttcagctcacaagagagcattttgtcagagtaagatgtagaactgacttttgttgcagtgtcatgtggtggtgagactcatcaggtcacagaggtggggggttattgaaaggccctatggcggtgcacagaagaagcagattcggggtgctgcagacaggagagggggagatggagctcgagtcccagctctctgccccttccaggccccagcttccccatctgtacaccttggaagtagagctagaaagatgacctctaaggtcctatccagtgtggggaccttgtggaatgtgcatagtgtgtggccagtctttgaggtttgatcctctgggccaggctttcagcttgggcctactaagtagaattcaagatctctttaaaatggatgcaaatttgtgtgggtttaggctgcatttctataaattcatcatcccccaaaaggttaaaagacaggttttgtttatacagtggtggagccgatgagaaacggaacctcagagaccagggaaagtggccctgtggcagacttgctcaaaggggcctcagcaaccatctccccctgcagcaaccccagctggcaagctgccactccttacataactgttctttggaaaaccaggcaacaaaacctccaggggaaaaaaagctattgattattaaagggtatttagaggtttagagactcacaataaagcagttataattattcctgtaatgacacatccttcgaaatgctcagatctgagaacattttgcttgcattgcatcagtcatcatcattacagggagaaatgcagagagctggaaatagctcgtgtgcaagctacaggcaaggagtcacaaggaaaggagcaaattgacagcgagtcagtgaaggaaacaggggagcttccaatgcccagaacctgcacacagtcctgcagcctctgtctccctgccttgctgccccgcttcaaagccagcttctgctgccaaaggactcttggggttgaaatgcttgttgcacagttacacatcagctgacagtccttctctgatttaatgaacttcatctatgaaaaataccctcaacaggccgggtgcggtggctcaggcctgtaatcccagcactttgggaggccaaggcgggtggatcccctgaggtcaggagtttgagaccagcatggccaacatggtgaaaccctgtctctactaaaaataccaaaattagccgggagttgtggtggacacctgtaatcccagctactcaggagtctgaggcaggagaatcacttgaacccgggagacagaggttgcagtgagccgagattgtgccactgcactccagcctgggtgacagagtgagactccatctcaaaacaaaacaaaacaaaacaaaaaccctcaacagaatgtcaaaaaaaaaaaaagaagaaagaaagaagaaaagaaaagaaagaagaaacctgggaaataccatcatctttctgcttttgataataacaataactagcatttattgagcatttactctgtatcagacactcctctaagtactctctgtatattatctcatttaattctcacaaaaattcatgagctaggaatgataattattcccatttactagacaaagaagctaaggcataaattggacacagttatacttagtatggggcagagtcacaatttgaacctggctggggtgaccctggagcccccagcaggccgctccctgttaaggtttccaagcgcactcttgggctggtagaacagccagcaagacgagggcagggggagggatggtgtcagagaggcatctccctgaagaatctcagaggacactaagtgttgggcaacatttggtttggtttcgtgtctttcgtggttcacttggaggctttaatcccccactttacatagccctctccacgctgtttctgttcatttgacaagtatctactgagccgacactttgaggtccgtgggtgattctgaggagaactagacacagtgcccatcctgggagatgcataattaggtgggacaggggtgaaaatcaatccaacaaaccagaataccaggcagagagcgccctcgtggaggtgcagaggctctgaggaaggcctcacagcaacaaggacaggcaggtgttcccctgcaggatgagggttcacatgggctggggagagaagaggagggaccgcccacagaggggaccatgggcacagcactcttacttcatgattgtgtggccttagaaggctcagaatgacaaccccagctgctttgcgttcccgcagctccaggtcccttctccagccacccagccccaagatggtgatgctgctgctgctgctttccgcactggctggcctcttcggtgcggcagagggacaagcatttcatcttgggaagtgccccaatcctccggtgcaggagaattttgacgtgaataaggtaaaaggcgaacctcccgtttgttttgctgcctccgctgtgaataagcgttctacaaggttcaatgtaattatgctgctttaatttccactgcacaccttgggacaagtatttatcttatttggggtttccccaaagcagacatctgctgagataaagactgcaggcagagaggtttgggatgatcccgggacgcacgagagcaggtgggaaggtgagtcggagacagcacagaagcaataaagggtgcgttcctgagctgtcgccctgggccgtcagggtcagtcacactgggcaccctctgaggacacgtggagcatgcccctccgattgtcccacagctgctgccagcaggtcatgggagcatccgtggctctagctgagccccctggcagaggagagacacagggtctcaggtgggaggctggcagtgtctgggaattgcctaccgtggctgcggtgaactcagaggtgggctgaggggaacaggaccagggaaccatagtagctgctacagagctattatccttgttctacagatgcagcatcggaatctccctccccagctcacgcagctggtaaatgcaagtaggattcaaaaccaggcttctcagcagtgcagggcacccaaaggtcactcaaacagggctcaggaaagcccaaaattctccagggggctttcttggtatctgcaccaaaatgtcatcaatacaacgagctcctccatagatggtctttcttcctggggtttagcgggaggggaaggaagagggcggcagaaagaggcagctattggaggacaggactcacaggctcccactgttgctactcaagcctggaatctcacccttaagacttcctctccttaggagaaggtttggatctcttttaagaatggcaacagtaacatcgaagttgttatcatacactcgcacctcaaggtgaatgagtgttgggacctctgaggggacgctgggtgggagaaggagcaccatccatgggatcaggagatacaggtgtggtaggaagaggccatagagtacactaacgtctacactgacttgctccacttacaggctgatccctttattcaggtaactctgatagaccacagagaggctttaaagaaaacatccaaggaatctgagttatactttcgcttttggatacaaatcccaaagcactttggaaatgataactgatctgtatttatagaagtcctttgagaattaaagcaggatttaaaaaatagcagctttattgagatataatttgtatagcacgtaattcacttgtttaaagtagcttttcactttccattgttgttagtatcatcacagagttacgcaaccatcaccaccaccatcgatttagaacatttcactgttccgaaaaggaacctcatacccattcacggagtctccatctcccctccaacccttccagccccaggcaaccactaatctactttctgtctccgaatttgcctattctgcatatttgataaaaatgaaatcatactatatgtggtcttttgtgactggtttactgaacgttttcaaggttcatccacgttgtagcatgtatcaatactatatccccttttattgccaaataatattcttgtaggaaatcgttataggaaatcaattgactgtatatgtgagagtttatttttgcactctcagttctattgatctatatgtctatacttatgccagtaccacacagtgttgattactatagctttgtagtaatcaaagccttgaggtaagctttgaaataagaacacatgtgtcctccaactttgttcttctggttattccgtgtcccttacatttttatatgaattttaggatcagcgtgtcaatttctgcaaataatccaattggaatttgatacagattgcattaaatctgaagatcaatttggggagtactgccatcttaacaatattaagtcttctaacttgtcaacatagtgtatctttccattgaattaggtcatctttaatttctttcaacaatactttgtagttttcagagtataagttttatgtttctttggttaaatttattcccaaatattttattcttttgatgttattgtaaatggaattttcttctttttcttttcttttctttttttttttgagacggagtctcactttgtcacccagggtggagtgcagcatcaccatcttggctcactgcaacctccgcctcccgggttcaagcaattctcctgcctcagcctcccaagtagctgggactacaggtacacgccaccacacccagcaaagtttttttgtattttagtaaagacggggtttcaccatgttgcccaggctggtctcgaactcctgagctcaggcaatccatccgcctcggcctcccatagtgctaggattacaggtgtgagcaagccaccgtgcccggccttttaaatggaattttcttaatttcatctgcaaattgttcattgcaagtagagaaatatgtttatatatgtatatatttttgtgtgtgtgtgacagagtcttgctctgtcacccaggctggagtgtagtggcaccatctcagctcactgcaacctctgcctcccaggttcaagagattatcctgcctcagcctcccgagtagctggtattacagttgcgtgccaccatgcccggctaatttttaaattttttatagagatggggcctcgccatgttggctatgctggtcttgaactcctgacctcaagtgatccacccgcctcggcctcccaaagtcctgggattacaggcatgagccactgcgtctggctgagaaatatatttgatttttgaatattaatcttgtatcttgtaaccttgcttaactcattagatccaatagtttttggttttgtctctgttttagatttcttaggatattttatatgtcatctgcaaacagatagagttttacctcttcttttctaggattatttttcaatactgaccagagatctgaaaagattaagaagcctttgcaaaaataatatgagatcataaggaagctctgagtttcctcttttctgaaaaatcatgcttccttggtttttactatggggcactaaactcactttaacagaaatagaacagatttgaatgcaccatagaaaatggagcttcttccgagaatgtctatgaaaccagttaacctctaaccttattctttggtactttaaatgaatgttaagttcagtggctttaattgaaagctgtgctttaataagtgagtagaactttatggtcatgaatgtggcatacatttgagcggaaagccgtggctgaagcaatactcacctgtgtgcagcatcctctcttttcaagttctgactctgaaggtgagcgcatctctttttgtttttaaatttctagaataggccaggcgcggtggctcacgcctgtaatcccagcactttgggaggccgaggcagggggatcactaggtcaggagattgagaccatcctggccaacatggtgaaaccccttctccagtaaaaatacaaaaattagccgggcatggtggcacgtgcctgtaatcccagctactcgggaggctgaagcaggagaatcacttgcacccgggaggcagaggttgcagtgagcccagattgcactactgcactccactctggtgacatagtgagactccatctcaaaaaaacaaaattctaattagtattttaactagataaatatatttacattgttcaaaatcctaaaggtgtaaaagaatacaccacataaagtttccctcccacctctgtacctcagtttccctccccagtagcaactagtaaaaaccatgtattatgtaattttacagataatatatacatatacaagcaaatacttaataactgtggtaagcagaagagtggcttccaaaggtgtccacgccctaaccttgtgaatgttactttgcatgggaaaagggcttttgcaaatgtgatcgaagttatgagccttgagatggccagattagccttgattatccaggggaactcaatctaatcacataaatccttaaaagcagagaatctttcccagctgtgataagagagagaggtttgatgatggcataagagtcagagagatgcaatgtgagaaggatctgacttccttttgctggctttgaaaatagaggaagcctcaagccaaggaatgtaggcggcctgtagaacttggaaaaggcaaggaaactgatcctcccctagagctcccagagggaaacacagccaacactttgagttcagcccagtgagacctgtcagacttctgacttacacaactgcaagataataaatctgtgctgtttgaagcttgtgctaatttattatagcagcaacagaaaaccaacgtaataaacattttctccatttttacacaaaaggtgccttaatagatacactattttgtacctgactcttttgtcattaaatattagaaatcactgcataccactcttttgaaagaggaagtaaaattccattgtctggatatgccatcgtttactcacccagccccctactaatgctcacataggctgtttcctatcttgtattattacaaacggtactgtaatgaataactttacacatacatcatttcttatatcaggaggatgcattcccagaagtgaaattgctgggccaaagagtataatatgtatttttagctttgctagatattgccaaactgccctccgcagaggttgtaaactggtatggtctccctgcaacgcgtgccaggcagcctaggagggcctggttccctcgaccttccccacacagtggcagcttcctttaaagctaactgtatacacctgaagtctggactgagcgcaggcccctagagaaagcatgatacagacctttcaaatccccaccacctctccaaagccttgatgactaaatccctcctcagggtcagatgaggaaagttccgtgcgctctggagtcctagctccccacagcgaacacatctgactttgcacaggattcaaagatgacttgtagaattgtgcactgtttcagatgaaaggtatttcccatcatcccctttttttacagagtctagaatgtcacagcgattttggctgaagtgggccctgagaagagccctttactcagcattcaccccctgcccgcacatcccatcctagtcacagattctcattgcaatcaatctcttgcccagttgccactgggaacaatgaggcccattttgtctggcttccccaggacagggctctgcgtctgcacgacaatggggaagaagttgcaggtccccagagaaccacagggttttgctctgcttgttgtctctgcagtatctcggaagatggtacgaaattgagaagatcccaacaacctttgagaatggacgctgcatccaggccaactactcactaatggaaaacggaaagatcaaagtgttaaaccaggagttgaggtgagtggctgtgggcgtccggggccaggcctgcggagtgctgatgcagagtgactgggtgtccggcagcctgggtcagggaggatgggaaccttgctggatcgggactgcctgctcctagcaggaattgagaggaaagcgtttggcaggcaaggatggcaaggactaggatccacttatgcatttccatgaccacctgcggggcacaaactgacagggttcctgcactcactgcaaaatagatactctggtagcaaagaacatcaagaccatctcttctgacctccagtctgggagagaagccgcttcgacaccatctgctgacagaagcatccagctttgttcaaacacttccaggaactgggagctcatcgccttccaggacagttcatcccatctctgggcagcttaatctatcagaaagctccttttcttattaagcaagaatcacatacacaacattcacactctaggttatgtaaacaggatatcctttagaagtgtacatttctattactgagggcttctaacacaataattaatccaaaaagctacgctttggaaagcaactataaacttaaaaagagccccaggaagagctccttcctacccaccttccactcttgaaaatacaaatgcagtttttccatgaacatgttgtgacttcatggtcagagactggtgtcctgaaaaccgttctagagcaaaatgcaattgacggtgaaaagggcagaatctgctgggaggagactggtttgttgctaagttaacgtatgcagatagaaacagaccatcttccccagctgtctgagatccagatgagagaggagggcacggtctccagctttacatggtgataaacagagaaagtacttgggaacatcagagcacagttcccagaatccctggcctgttgctcattgtcctgtttctaggacatccgtcaccactaaccatagcattaacctactgactttcttttttttttttaattgtattttagtagagacggggtttcactgtgttggccaggctggtcttgatctcctgaccttgtgatccgcccccccttggcctcccaaagtgctgggattacaggcgtgagccaccacgcccggccaacctactgactttctaacacatacgactgctctaatttcagttggcctccctgctctgccttgaggattgataaacagacatcctctcctctgttggcttcctaggaagagcaccctgatgccttagcaccctccctttggtgcctccatctccacacctttccccttctcccaagttcatggggccattgggagtcatctagaaagcaggctcattcaaagaggtgaaagtattgcatccaatctaagcccccagcttttaagacacaccactgcgttatatgccactaagaaaggaatgacactgctaattgtcaggtgacatcaattgtgagatatgcatttcttcacatttaatgtctctgaaatctgggcatacctgagaatcactgagataaagtaaatgtttcttcactgcctccttttacttggcctacattgaaatcccccacactcactcagaggcttgctgaactagagggagtctctggactcaggccccttgatgggacaggcgatgtcacatgatatcactgaggcccaaagaaggggaacgcttttatgtctccttgttttgaattattttcagtgatcaagtccatcctcatctgtacctttggcccttctcgttttaaaaagaagtgaatctgccaggcacggcggctcacgcctgtaatcccagcactttgggaggctgaggcaggtagattgcctgaggtcaggagtttgagaccagcctggctaacatggtgaaaccccgtctctactaaagatacaaaaaattagccaggcgtggtggtgcatgcctgtaatctcagctcctggggaggctgagggaggagaattgcttgaaccggggaggcagaggttgcagtaagccgagatcgcaccactgcactccagcctgggggacagagcaagactccatctccaaaaaaaaaaaaaagtgaatcttctttgtgtgttgggttgttttgtttgtttttccattctcttttctccctttctttggagactgggagcaggaattggtctttcaggccatagaagatagtcagagatagtgttgaagtgcaagggcctaacatactgtcccatcctggagcttgtcaattgcggcttcttatcaccccgctgctctcttcccctgcttggcctcagagacagtcacaagggaaaggccaggccatggagctagggtctagcctgcctttgagagcctctcttaccagaaatcacggtgttggctgccacggtccttagtggcacaaatcttgcctttcgttgcttattggctttcaatgagttgtttttcttttctcttttcgttttttgtattttttctttttttaactcactgcagagctgatggaactgtgaatcaaatcgaaggtgaagccaccccagttaacctcacagagcctgccaagctggaagttaagttttcctggtgtaagtatccacttttcccaggaggattcagggacaggaaatatgcaaactgaaggctagcgccccggcttggagaattcctgagacacctgagtgtcatctataatcactcagcacataattatctgtcaaacacttactacatgtcacgcactagggttgccatgatgagccggacagagctggccttggtacttatggagctcacatcccagtgtggatactgacacgtgaccccgcaatttactataactagctagcgtttcaacaggtgaaacacaagtaggtgcacaccgggtgtgggctgcagaagacacaacccagtcttgtttcccaaaggaaactggggcccgaaacattagcagatattagcagaacaacctgcacggcgcagaaactaggaagcaagagatgacaagagtgacggcaagtttgaatcctgcttctgccactttccagtcacattgttggggatcctgtgagatacctaatgacaggcatttgcctctgggttctgagctaactgaggaagggacacaggcaatagagaaagcaccaaatattagttttatttccgacgaagatacactagagagttcaacccagaactgtgaggctttctaacacgaagagtgcttgaaagcccctttcccacctgcagggtagacactgaagtcatcagctacaaaagttactccctgcacttcctacttctcatctctgccactcctccaccccacaccagtcaagtgcctagagcggggaggagaggaagttctaattttatagaccaagaaaggaatgctgggaggagaaaacagttcttctcacactatgaatatggacaactaacttcacatgtacaagccagaaataactgcccagtgtcgtgaaaataaaccagatacacacgctctgtaaactgtaaagggctttatacacagtttctcttgttatttttatcaagaagggagctaaagtgcaggtgggctgagtgacgcaggccatcactgaactcattagaagtagagttgggacctaaacctaggtctccaaactctcaactgagtatttttcccatagggatcagggacggggattggagtgaaagctaactattacatgcataacaaggattagatgtttgcgttaggccttgtaggattatgggagattatggaaaaggatttccaagtgaagggaactggaacatagaagaaggcctgaatacaggcatatcacgaagtcaggagttcaagaccagcctggccgacatggtgaaaccctgtctctactaaagatacaaaaaattagctgggcatggtggcgtgtgcctgtaatcccagctactcaggatgctgaggcaggagaatcgcttgaacccaggaggtggaggttgcagtgagctgagatcgcgccattgcactccagcctgggcgacaagagtgaaactccatctcaaaaaaaaaaaaaaaaaaaaaaaaaaaaaacgaagaagaagaaggcctgaataaagaggcctagagcctgggagtgtacatgaagaggggcatgaggttaggaagggccttgaatgccacattaaaaggcttgaagtttcttccataaacaataggagactgtcaaagttttcaaataaggagagacatgtgaagttttctgtattgtatctgggtaaatttattcttcggaactggaccacgagaggaaggcagaatgtgccagcctgggtgagtgcaggtgggccatgatgccgctgctggcagaggtgggagacagatttttgcaaaatcactctgggcttaagagttctcagtccacctgggaatacacagagcagctgaaatgtgcagatgggtgatgactataacgctgtctctctctctctctctgtctctctctctgggtgagtgaggcaggcaggcaggcagggcaccaacagtgctagaaagggtaagtcagaaacactcagtctaggctttcgtccaaacttctttccagggtctttctgtttctggattgataaacaaaatcagaggtggggggcttggtgggtggttgtctgggccagccttcttgtgttgtcctgagatttctcttgccctctccctccaataatgctgcctctctctggttctcagttatgccatcggcaccgtactggatcctggccaccgactatgagaactatgccctcgtgtattcctgtacctgcatcatccaactttttcacgtggattttgcttggatcttggcaagaaaccctaatctccctccagaaacagtggactctctaaaaaatatcctgacttctaataacattgatgtcaagaaaatgacggtcacagaccaggtgaactgccccaagctctcgtaaccaggttctacagggaggctgcacccactccatgttacttctgcttcgctttcccctaccccccccccataaagacaaaccaatcaaccacgacaaaggaagttgacctgaacatgtaaccatgccctaccctgttaccttgctagctgcaaaataaacttgttgctgacctgctgtgctcgcagtagattccaagtt

SEQ ID NO: 152 - DNA, 336193 bp, Homo sapiens
gagaaagagagagagagaaagagcaagggggaaaagccacagtggtaggcagtcccactttacttaagagtactgtgaggtcacaaaccacatgattctgcctctccagtaatagtgcttgcaaaaaaaaggagttttaaagcttttgcttttttggattgtgtgaatgcttcattcgcctcacaaacaaccacagaaccacaagtgcggtgcaaactttctccaggaggacagcaagaagtctctggtttttaaatggttaatctccgcaggtcactaccagccaccgagaccaacagagtcagtgagtgctctctaaccacagtctatgcagtaatagtaggtccttcaaatatttgctcattctctttttgttttgtttctttgcttttcacatgttaccagctacataatttcttgacagaaaaaaataaatataaagtctatgtactccaggcatactgtaaaactaaaacaaggtttgggtatggtttgtattttcagtttaaggctgcaagcagtatttacaacagagggtacaagttctatctgaaaaaaaaaggagggactatggcatcaaacagcctcttcagcacagtgacaccatgtcagcaaaacttcttttggggtaagtgttaccatttttaaaatcctgtaagatatgaacctgttaaacataaaggtatgattctttgataaactgctagcttttccaaatagcatattaaagatcctaattatgctatcttgttgcattaagaattgaaaaatgaaatttctgtatatatttgcatttggtatctgtaatgtatctaattttcaaagtaatgacttgaaatatacaaaattaaattatctcacattgatcaaaatgttttctagagttatagaggtgaggatatgaaaacagtaaaagaaacagtttaatactctcattaaccctcaccagaagaaaagtcagatcctaaattaatcaaagcattataaattattgactccggcagctcccaatatttgagcaaacttcaaaaaggaagcaattttacaaaataacagaccacagaattatctcaacattatggtctaccatgtataacacagaaataaacctgtagtacagttaacattttaaccagctcaactaaaagaaatctacttataaattcaaactgtatcctatctaaataagtttgtttctaaacaactttatataagtatacattcagctgaaataaaattatgataagcacatcacagccatttttaaaagatctttatagttgcccaggatattaaaaagttcatggaagtattttaaaacttacatgcaactgcatttttctatgtaattttaattttacatctacacactgttatccatagaccttgttataaacacactgaaacactgaaacgtctaagattcttttaatcacattcttggacctaccaaaatgaataactgctgtttagtctcatgaaaaataaagctccataaggataccctgtatgatttttaaaagccacaactattaaaccatgctggactttaaaagaagtaggcataatcttgtcccttaatatttaatttcaagttactgttgatacagatatgtaaatgactttaacattcatcagctgatgtgttattatagcaaaatatctaaacacacttacaagattctctttatgatctccaacatgttccaactacaaggcaagttttcaaaaatttttcttatatccattaaaataaaccttcttgctgtgtacatctatattaactctgcttttaacttacaactaatgactggagtttcctttactcctcctacttcacacattttaactggatactactagaggatcagtctcagtttaggtcaaacagaaataattaaacctgaagggagaaaaaatggtttctcttacagggtgaggaaatgtactttgtattttacaaaaaaaaatgtaaaattgctttagtgactccctcaatagctgtaagtgggccccctcagttataatatatacaatataataatcacagattaatttaaaattttaatgatgggtaccaagtattactctaaaaacttctatattaaggaagcaggacataaacacagctagactacattacaacacatagcataattacagcttatacatcgaaagttttgttactactacccaagagataaaaggaaaaagaatagttaaaactactgttacacagagggataacttgaaacagggataacagagatatcagggagggataacagaggcagttaagttactctttcacgttatcactctgtttaactatttattttaaacacattttaaaaaccagatcaggaacaacacaagtttcaaaaaattcttcagtattagaagtaaagttatcatgaagaatatgttaaaattctcacaaagaatatattaaactgcttcttattctatcataacagggatcttatacttctgtaacattcttaataactattcaaaatttccaaaacttgacaggattctaagcaaggcatggtagtgaaccttttttttttccaacattacaaccagttcttcctcttttgaaaagtgggctgcaccttccctccccgccagcccccaaacagtatcttgaagcctgaatagagaacttaacatcaacccactacctcagactaattacaggtgagtagtggacatcatgtatatgttatcacattgcaaacatttccccattctataatctatgcaaagcctaaaacctcacttcaggctttagatttttatataatgattatcaccaccacctaatgaaatgtcttaagtatgtgccccaattttgtaaaatagttaaaaagaaagtttaggattttcctaggtgaggtacaaagcacacattaacaactgcttcacctcaaatacaatgagtggtgtgtgtgtgtgtgtgtgtgtgcgcgcgcgcgcgcacatgctagagaaagagtatgtctgtgtccttgatctctcagcatacttcactttgagttaatcaaaaattttcaatctgtactactcaaaatctgtccatcatttatcataaatatagcttgctgaaaatcacagatgtgactcatagagtatcttaaaattaatgactcatgaaaatatatcagctgactgattatctacataaaatctttgtaactgcttgaacatgatgtgtgaacactgatttccaaaacagcaattgtggtccatatcaataatatatttatagtttcaagattcagtagtgacaaagttttatagcttctttttaaaatacagagctaaattccaaaactagggagcagaattacaaagttaagaacaaacacagaaaatcactctaacacatatcaaaagctaaaaatgtcaaagtaattcccaaagactcatataaattattttaaattataataatcctaattttacattacaaactgttaaagatttttagtttttatttttaaaaaatgttttgaaatctaaaacactgaaaagaaattgtggaaaaagatctggctggtctgtctgactctcctgatcaatccgtctctatatcacaaggcatgaaatatacatgattacattatgatatattttagttatcttaaaagaacaaaatattaatttattcaattactctcttccagctaacaactgatagtttgacttgtttaaatcagtcatgctaaagttaaattcggtaagatagaaatgttccagtttgttaaaagaacactgaaatatttgatggttaaataaactgcaggggcggggggagctaactcattgaaggcactaagattttatcaaacacacagaattaatatttattgaatagaaccattcacaaatcaaaactcactgtactccaatactttaaagcagcgctaatcaattacaaaccttttctagtgcttcaaaattcatgtgctttcaattttacacactggtggtcctcaagtactgtactgaggctgagttaagacattctgtatcacaactttttttttcaacaaatattcatctagagggctttccccctccccccgattcaagagctgctcacatgaaaactgtggtaatatttttatactgtacttctttgttgaagcaaaaggttaggggttacctaaatacctcaactgtatatatatatttaaaaaaaaggaaaaggtaagtattcatagaaaaaaatccaatgggactatattatttatttttgcatttctcatgattaatgatgcacccgtgcatacttgaaaattgacggcaaaacagggtaacatctcaaatccctctccaaagcatacaaataccaatcttccatactgttctaacctttgttctaggatactaagatatgacaactctaagtcaatagtgaagtcatgcaaaagctcattaaatgcattaaaactgcaaatactattacctaacaaaaatctttagacattttatatgaaggattcaccgaaacagtctacctctatagcatctattaaaaatatataaaaacatgtgaccaaatagacaaatgccatcaactcaatgtgaaaaaaatccttcctgcaaatactaaaattgtaattatggcaaagcataactattttttctagtcactcacaagtcagacattactaatcaggtgctagcagatccaatggtaatttaagcagagacttctcaatacgttaccttaatgtactattttttctcctataccaatgaacgctgcaacttccactgaagatagataaaattctgcctctcctcaccccccaaaaaatcataaaactcccataataaagataacaatgaactccaatacttggtattttctaaataataaaatattctaagctaactgtctaaagcatgtgaaaattcttcatcaaatctgagatgttagtatcttaaaacaaatctttaaaagaagtctcacataatgaaattttatgccttaatataatctcttgccatttcaaaaagattatgaaattcactggatatattttttgattaatgtgttacgattcaaaaaataacagggaaattctataccttattaaaagggagtttccttacatttttaaccacagtcaaccacaagcttttgtccattcaacagcacatacacatgaaacagaccatacattcccatacaactgttttaagacctgtatagcaattcagattaaatgctcttttactgtatacagtatcttcactttatgtagaattcttaggaatttcctcccctttatactatttattaagggcataggactcaagatttggaacagtgttgagtggatgtaagcaacatgttatcaaacactttaggttttgttgttactgctgaatagaaagaagcctaactaaagcaaagtttttcataaacactaataaacagaaactgcatcatttaacatgatataaaaaacaatcattttttatatcatttaacctgatataaaaaacaatccccaaataagatgagctgtagaattaaaacaggcctttaaaggctagttgctacataagtacttaatacatgaagagaaaaaaattgttattcatgcacttcctctactctatattcttgttaatactcataaatccaatatacacccaaggaacaaaaatcataccaagggtgacttgagctctaaataaaagataaatgtttaccttgattagatgattttcatcttttaaatcaactgcccacaaaacaaggaaatctctgacatatatacatacgcaatttcgataatgtttgagatatttaaaaattatcatactgatgttagaaaatttaccaagttaacattattcccagaaatatatctaagattattttggcaaacagtttaaagactcttttatctctactattcctattgccaattctcttaattatacattagttacatcagattagtgacatttctaaaaaggtatatctaaatatcctatgtaaggcaaataattttcaccacaaagtcaaataaggtaattttattttacatttcagttacatcgattttttacatcaatgatgtctaccagaatcattatataccatcaactataaacatatatttacataatagactaagttaaaactcaagaacttaaatacacatttgtaggttcccctaaattacatgaaccataccattatttacatattccttatagtcatgtatcttacacctacatctattttgtgcttcaggaaaagcaaaaaaaaaaaaaaaaaaaagacaaagttaaatgctagccaaatcacaataacaatcatcaataaggtttgaatacatatatatgcagtctttctttagaaatatcagaataataacgtgatattccacagaacttcacatgaacacgatgtatttttacaccgaaacaaaatacgtgtcatatatgttcaacttaaatttcttctggctatgtttgtcttaacatttttatacatggcatatacacatgcatgagtgtgaatgcattcacaccaatgactacagaacttgtaataatgattataaaccaggaaaaaaattgtaaattatgtaactgaggtactatagttctgtcatgaaatataatcaaaatttttttgcatgtaagttaacaaatgtcaatctataaaaccagtaacagggattaggcatctactaggaatttcaagactaaaataatcaatcttataaaatccaaagatgttattttccagttataaacttaagtaacaataattaaaaactgatatcagttaaacaaagtattagagtttataagggcaaatatgaatggaattaatttgctaatagattcctatttataaatattatctcaaagaacaactctggcttgaagctaaacaggtatattttctcattgaccatgtaacctgggtaaacaatttaagcattgaatttctaatttttctatgataattgctagaattaactttctttttaaatttctgtactgaacttcccagtttaagacttcaaattcccaatataattttaagtgaaaagatataattttactaaatgattacaaattatttaaatgtatctaaacaatgtgaatttactttgaagcttaaaagaaaggatcatgacatttattttactatgtaatatggtattacattttacaacatgtcaacctactgctgtatcactataacgatcctagaaaatccatgtgtatcaaaaaggtacacagtatggattctcttcaatcaattacaattttattataagatactttaatgcaaacacagctcattaaaatacatttttttagataaaagtaaattctcattttatttcataaactgtcagattacagatatctgtaacaactgtacaggatcacagaaaggaaacttctttatgctaacaatccacattatatcaatcactgtgttttccataaagctgatacctgtgaaagtacataagcatttcatactaagaacctaacacccaattcaaaaatattaagacaccatgaagtaatctatgagaaaactcccatcaagacaacagcatcttaacattaggcaggataaatggttacaaaagataatctaataagattaatttttttacctctcatgaaatctgtaaagcatttcggtaattcagcttttgacaaaatgcagaaaaacttgctactgctcttataagagtcaatgcaaaaatgaaatatttaagaagataatgcctatggagatactacttacaaagacaatgtgctacagtgtatttctaaagaaatggaaatatacaagtcaatgtactccaacttttgatcattaatccaacctcctttccacagaagaaactccttttcacatattataaactccagtgtccacccagaattcttctattctcccagttttcaaaaccaaacacatatacattatttctctctctgtaatttagaaggaaaacttaacattttaaaaactttttaccactagtaaccacttcattttaaaagtgttagctagataaggacaatgagtactgtcacgaaagctttattcttgattatgtagtaaagatttaacaatatccctcccttataacacgcataagcatattgcagaatatttttgtacaccaataggactagagaaaacacataaagtgatctgtttttaacattatcactcacaagtacccaggaagaaaatttagagccatgtgctgattattaggcttatttttattttcataaatattctggtcctatcaagacacaagacacactaaaatcagaatctatcaagatacacttaaatattttttaaaacatcaaaatacttggcttaaattgctaaattatttaattattaaatggttaaaccactctatatatgtacaataaatttttactcagacgtattcaaacaattttcttgactataaaattaaatcctgtgctccaagaaatactgtaacacagtatttttaataaagtatttacttacaaagtaaatacatattagatgtacaaaaagataggaagtgattttctataatataacttcattaataatacatgtaactcaaattttctacctctgttttaaactttcttcattcaaatacatggtcaattcacttaatttttttgatccagaaacatcttaaatgctgttttaaaggaaactttaataaaaatggccttactcattattataaactggcataaaaatattttttgaaacttgctgtgaaaacagtgtgatctgaaaacttacatacttaaaacttatgacatgaacacaaaaaatgcaagcaaatgcataaaactacatagcaacaataatatagtgagaagccaaccccgaacataggagatatacatatgctttctaaaataaaagctcaaattaaagcttgccttttgaactgcccatatgaacagaacaacatgccaatgacttacagaatttttttctaaactggcaagactaaaaagaatcacatccaatccctattttgcaattataatgtgtgatactttctttaaccataagactgtcatttattctaaatttgctggaaaagcttgccattgcatttttcctgtacgtacctcttccttatcaattatggtgtatctccagcattcgaagaaaaaaaagctccaaaactttaactgcatttaaaatatataattaaatcaatatatacaagggttactctaaaaatactcatttctagaaggccagaaaatcttatttttttaagctgatgcatctacacatagaaagcaacttttagtaagttcttttgctacgccataatgatctgctccagaaactcaagggtacctaaaacaacggactacctgttctagccatgcttaggaatgtgtccaaatcatttttattgatttaacctttataggaatgctacatatcctcagagcaaaacattttgaatgtatttataatatgatacacttctagaagccatgaaaaagaaagctaaaaacaaatctaagacgcccctccactgttggttgttatgtttatttttgtttatttgaaacaaatattaaatacatattaaataattctttttgcgaaaactcactttggtactactgtaagtagaaataagattttatttttttagagaaaaagtatatttaagtaaattctaactttaagaaacaaaactcctgacttgacaatgatgttatcacctataaattttaaaggattctaaatgcttctttcatactctaattacacattaatcatggaacctataaacaaatcaaacttaaacttacagaatttagtctttattgaataaacttaagttgtactctagttttcatcctcagagtttacagataaagttctgtgtagcctatctttctagctttctgtaagttgtactttacaaatggtttcaacagctaatgcctgtattaggtatgtttgccaaataattcacaatattatgcttcctcacattatggttcagcatttgctaacttaaacatcacctctaaagaagttatactttcactgcagattgttctctcaaaaaaggcaaacaacttttgagcatttccagatgtagctctcataaaaaaaaaaaattataggcaacttctcaagaaattctaaaatcagtaataaaaatacaataaaactggtatcatttctgattacttcaaatgatcacatataagcttatataaaaagctgatggtactatattttgaattaagaaactttgacagctacaagagcactgatttcaggtagctgccagtaggtaaaacaaccaagtgtatttcagtgtcaaacaagattctgctgaactggaatttaggaagctctgagggttactgaccatgtgataaaaataataatactatctttctcaaatagttaatttatttttatactgggcaatataaatttgggttcagctatactatttcgttttgtcatcaatttttttataaaacatccaagtatgcatgagattatgctaaactaaaataaaaataatttatatgcagcctatttctctggatgagacaagggaggcatccagggcacaaaatttaaggaggtactcactcttgcacagtcctcaaagagacagcctccttaaattttgtgccctaggcactttgcttgcctcatacaaattctagtcctgagctgaagacacataagtataaactatttacactcatgtgagtataaaatgacatgtaataagcagggtgacataaaacatagaaataaggtaatataagaagaaaaattaaaaataagaatatttacattaaagaagacatacttgccataaatatcttgcaaactaagatagttatggccttattgcttgactataaggctaagtaatcttattacttgactataaggctttaagaaaaaagggattgaaagagtattccattaaagaattcactagcctatacaagacttcttatgttacagtggtatccaaatctggctgatcaacagaattacctggggagtaagtcttggggaagagcagcttgtggagagaaagccttcagaacttttttaaaacaaaactccctagataaattagccaagattgtgagccaatagatagccaacttttaatactcctagaaataagctaaagacaaaatgcatatccaaaatatattaattccaaattgtgtccccaataaacatttgtaaagcttgttcacaagaaaaaattagttcctttctttccttccttttcttccaatagaggtgatagtcaatggttatgtgtttaaccagtaatattaataagaaaaataaagttgtgtttaacaagctatattaataaggaaaataagaagtacagaggattccataagatgactatagccaaaaacattaatattcttatttttctattaggttcaaatagctattctaagtacataatcaatctaatccaaaactttattttaaatgttgttttaaattatttaaaatttattaaagttttaatttaattagacaacatattttgaaaaatcaatgtaactaacatagtctataatttttatagagtataccttaattgaaactgtactttgttagctttcattgtcgagcgtttactgtaccgggtactatgctaagccatttataaacattatttcctttaattcttacaactcccttatatgagacatgtatcataattatttacagatgaggaagctgagaatgaggtaaaggaacttgctcaaggttacagagttgaagagatgggattccaacccaagccttttaactcttaattaccactttacagtgttatacatgatctaaatgaagttacttcctagtcctcaatcaatttcatctgtaaaggtgttagttctcagaaacataattattctaaagttattaaaccaataaaatacaaacaagaagataatcctggagtcttcaaattaccctgccacatatctttaagaaatactaatctgacagaaccaaagagattaagaaaaaataaaagtatatcaaggaataagattaaggtgaggtttgttaagcccccttccccctcaagacaaggtctcactctgtcacccaggctagagtgcactggcatgatcacagctcactgcaactttgacctcctgagctcaagggatcttcccgactcagcatcccaggtagcttggactacaggcacgcaccaccacgcccagataattttgtaattttttgtagagacaggtttttgccatgttgcccaggctggtctcgaactactgggctcaagcgatcctcccacctcagtctcccaaagtgctgagattataagcataagccaccgcacctggcctttaggtcgagtttgatcagaaaaaaaaagtttcaaggaattagataattcttaatcattataattaatagtcttaatgtccacaatacacatatatactctatgtgatataaaaatataatttaggggtaaaaaattaaacacttaaacaccaagaatgtctaatcctcatttataaaattaaaataatcttgtatcataaatatgattataatcataggctttggtgtcagatctggaatcaaatcctacttcctatatttatctgtagcattccttatactatggtctcatagccccatttacaaagacctatacccctacacatatgctaagtgatccagacaacctttatttctaagctttaacttctaattataatttcttaaattctaattcatttgatattcacaaaaatccactagtaagtgtactttttcctgtgcctaccaaaaaaatactgcacaagattctaagaagtaaatccttgacatgtactattcaccccaattttaaccacaattatccacattattactcaaaacaaaaagttctcaaacaagccacaaaagtgctccgcttttttctctggcagagggtaggaataaagctatgagattatatttttcagtctatatggttttgagaaaaaatgctgattagaaaccataggttatgatatgatacatgagatattttgcaaagataaagcactaaggaaaagagaaaagctgtttggggatctatgaatctcaacagacttctccaatcattctgcacctatatttaacttgataggtaatattttaatgagcaaactaacaacttttaaaagctacatgaggtaggatcacactaaaataaatacatatgcaagtataaagtcataactacattttaaaaggaaaacacaaattttcatattagttttcattagaaacatccactgaaaaaggttaaaagtgagtttgtctccgcaacttcataaagagtacaatggcataagactcgaggtaacaaaaagaaaggaatgaaatggcaaaatgtatacacatgaaaataactacggaataacagatagttaaaagtcctcagcagtagcaatattattacaagttctcagattctggtaccctatctggcaatgaaggcaagaagttagaaaaagatgtggttacaaattaaaaatgacacactaagataattcatcgcttttagtttaaaccctacaattattcacacttatttcatcagaagccactaaaaagatgtatgaagatagacaaaaggttctgtgtacagccagaacagtcaaccaaaacagcagagaataaattcacaaataacatggtgatttagtagttattaacctagcattaaaaaaaaacggagactggactgaaaaatatgggcaagttgaagagatattacaaagaaactaacagaagaatttggcagcagttatggaagaggcaaagaataaggaaaatgagactgccacttaggacagaatggttgatggtgccaatgatcatgaggaaaataggaaagggtttttattataaatagaatgagttctctttgtcactacagttgtgcctagtgaaaaaaaaatagaatactaagttatatataacacaatctcaattttttttttgagacagtgtgtcgctctgtcaccaggctggagtgcagtggcacaatctcagctcactgcaacctccgcctcctgggttcaagcgattctcctgcctcagcctcccgagtagctaggactacaggtgcgcaccaccacgcccagataattttgtatttttagtagagatggagtttcaacatgttggccaggatggtctcgatcttctgacctcgtaatccacccgccttggcctcccaaagtgctgcgattacacgcataagccacgacacccagccctacaatctccatttttaaaaataatatgagagtgcctctatatcagaggaactcaaaacagtcataatataaggtttacacagtagcaggattttggaagcctttttttttatttgccaatatttttcaattaaaaaccatcaatacataaaatttcaaaaatttagttaatagtttgcgttaatgttttaaaagcttatttttcctgaacccatacaaaaaaatacatatgaagaacaatgtttttaatttttcatgctcaagttgtaagaaacagaacaaagtcctccaattacaagatatttgtaaatcgaaaaagtattctcatgaaaaccatagaatgtcatggaaacacaaggacagcaggggttttggtgttaagtttaaattccagttatagcgcctagtacataaccctgagcaaccaacatttaagctccctgtgtctcaatttcctcatctgtaaaaatattaccacctaccttgaaagtttccagttaaataaaatgtaaagtgtctacactgatctgacaaaagcattacaattattaaatataatcaactttccaaaccttaaatcatcttaagtctaaactcatactcatagtgtggctcacaaaacagcagaatcagcatgacctgaaagcttgttaaaaatgcagaatctcagccgggtgcagtggctcacacctgtaatcccagcactttgggaggccgaggcgggcagaccaagaagatcaagaccatcctggccaacatggtgaaaccccttctctactaaaggtccctaaagttgttcacttgatctgtttcagagttctgatactgagtgaagagcacctggtagtttactcttaattctgaaggactcgagagactaacagagatcatctaatctataataattgcacctccaaaaggcagcttttcaaacctgaatagaattttcacattcatacacccctcagtttacccacaatgactgattaagagagaaggtcctatgtacataactctctcttgtaaaaaatgccttcaataatttgagacattctgcaaattattaagttgcataacagtacgaactagctactagtctatatttcttcatgttgtcaatgatgtctcaccacaagcttgtgaaaagccttgatgaagtttaaaaatggtgtctctgtcccatgttcctgagacagctatccagtagctctgatgtaacacagaagtttgtgaggcatgactactgctgaggaaaaccatttggctccaactactcaccttctaggtgcttaaaatcatgcttttaataacccatattagaatcttagccatcaaagacctccacctgacaggtctacaggctttcattttataaccagttgcccttgatattctatactagttgtttactggtaaaatattttacaatcacaggtgcctattcctgtcttttttcctctccatgactactaattgaataaaacagaaaatatgagacaattgtatatatgaaaaattgtcaaactaaagagcaattcaaattccttttattcggagagataaaagttgatatgaagtggatatgacaaagagaaagaacatccactaaatacttagtagtatacaaagagttagaccatgacaaagttcctagaagtttagctcctctgcaggggtttcttagactacttgaaccagaattttcaatcttatttcttatacagttgggaaccacttcatttatacttggcctaaacttccccttgtctgtatacttatttttgctctccacccttaaaactgacttgcccttagctataaacaatgtactttgttgcccattcatgcagtgctttattgttttcattctctgatggttttttttttcattcatgtccaaatgagcagtgccttagattctaaatatccagtggagagcccatatatgtacattttcctttgaacgtctagaacagtaacattatcaattaagtacttaactgctttacgatatgcacaacaaaaactattaagaggccacaaaaagctatgcctaccacaaatttaaaacccattaaaaatcaggaatgtcaaaagcatgttaactttttaggtaaagtgtataaactagctcttcatggttggctaggaaagcctagagaaaaaaaatcctaaatatgaaaggtgagtctgcctttaagacaaaagagaaatatacttggtggacctaaaaaagaaggccacttcagaagttaaaaatgcagtaagccaagattcagactatgacaagggagacggtaaaactaatggtacagaatttttaaatccctgaagtttaagggactctttacaagcaggatagtttagtagttgccatggactatgctctgaagccaagcttcattctggtgagtttagaaatctgtttcacctagctgaatcagaatttagcaaactgatttatgtaacaaaaaggctgtacattaaaacgttcctcatgggatgaaacagaggagaaactacccactcatctgcgctgcctcacatggatgttttgagatttaaatgagatattaatacaagatgtcagaatacttataaaaatctttgacactttataaaaatatcaaagataagctattacaatttagtattataaataaaacttctgttcacttgattgttaaagactgtaaaatgtcatgctcaaatgacatgttttcctatttgctatgaggttgacagtaaaacttttgccccatctcagcaaccagagggactttattatatgcatctctgcagacttttaccttctagattaattttgtatctctattcctttcaggcttcatctcaatttccattttttaatcctttagtattataaataattatgatagactcctcaaccaggatacaaatgataaaccaacgctcaaacctgcagcttaatggcacgatcagcttgctagtcctctaagatagaaaccttggaatcatttttggtaactaattctctaatctcataaatccccaagacctaacaatctaacctatgcaatatcacttacacttgcttgctattcttcattcccattccctcttacatggactactacaataggtctttccacagccaactcattttacatgatgcattatcaattcttcttaatgagtatcaatgcacaccgtacctttatctttcaaacatttttcaaaggtttccaattgtctttgaaaaagacttaactcctcagtctgccaaagcttgccacattttgatactaatcatgttttatctgtattttctatgacccagtttctctctagacacagtaagctatttgctccaaatgcctcatccctgcctctgtgtctttgatcatgctgtctcccgtacttgcaatattccctacctatcctcactgtcaccctacctacaaatctctacagggctaaatattgcctatccttgaagaaaaatctcaaacgacactattttcactggctttcatcctccaaattgaaaactctctgatccacctccatattcctatagtagcatatctgtaactcttttcacatacttacctgcatctaccacctgtcattctctcagtttctatgtgtgtaagattctcactctacttatgtatatatgtaaatatatataattctactagacaggtgatactgaagtttttaaattgcaaaatccattgttcataggaaatgctatgagaaagcccaataaataaaatagatttttaaaggagtctacagggttgaaacgaagaagggtgagagggtagctagaacctcgcatgccctcctgagcagccccacaggcaacttcattaagcacagagatacaatacagtacactaaactacacactctcttggtagcacagatacacaagaattccctctctcccactcttactttcttttcacatcatctagccaaatgcctggcatataataggaattcaataaacatttctttttttttttttttcttgagatagggtctcactctattgcccaggccaaagtgcagtggtgcgatctcggctcactgcaacctccacctcctgggttcaagcaattctcttgcctctgcctgactagctgggattacaggtgcaggccaccatgcctggctaatttttatatttttttagtagagacccagtttcaccatgttggtcaggctggtctcaaacttgacctcaggtgattcgcccaccttggccccccaaagtgctaggattataggcgtgagccatcgcgccgggcctcaataaacatttcttaaatgaattaatgaaacattaggtggaagtggatggacaaataaacaagtgcctaaacaaaaagtaggaggacttagcaaagggacgtggtaacagctaaagaaatactatataagaaaagaaaatgccttaaaaataacttacatggctgaaaagagaggtggtactttatataattaaaaattgaacacattttaaataaaaataccccacaaatatgtgtgagtttactatcaaagaaagaagctaagactaaagaattatttacatgtatcatattaagataagtgaaataatgggatatctggctaacatctaaatttaatttatattcaacaccttagaattaagagatatagtaaattaaactacagtgaataattaaatttctttaaaatgaattcgatttcactgatatatatatgactgttagggaacagtgttctgattttaagatgtatttccttctttctcaagttacaaatgtaaagttctgcaattgtatttaaaatcttttggtggtagatgtacacaaaagaaatacctcaacataaatcactatggcacataatgaacccaaaaggaatatccatgtatcattataggcaagatgttaagtttgagaaaaacaaaatctgacctttaatatattttttaaactggttaataaacataaatgcagcaaggcttacattccatatatttttaaattccccagcattcttggggtctgtctgcaaaagcaagggaatatgcacatgacagagaaaaaaattttaaataaaagaaacataatcctgtgagattattccctttaaatagaagagtgaaatccaaatactttatttttctacatccaaaaaagaacttcacaattcttttttttaaaaaaaaaagacgtatatttcattaaaacactgtttgtctatttatcagagaataattctgtattcacattgtaattactatttttaaaaaatactacatgcctactgaaataatgaaacagaatgtcagtatggttacctgtgaatgaaaaaattatttccctccttggttctagagattccaaaatctcaaacaaatgcattacttttacaatcagagaaagtttaaagttatataaataggtatgtatgcatgtgtacacatgtgtggatatgtggatatgtgtatgtatccctctaaatggcctgcttatgtctagcttatagtttttacgttaaaagcagcacctttctcatttccatagaaatgagaaaaaaggggcatacttacattatttaataattaagaaaataagtttaaatctaatataacatagcagttaaaagtctgactctggagtcagaaagaccaaatctaatcccagttctaccactgaatagctggatgactctggaaagctatttaatttctattaaagaaattctaaattctaaaaaaaaattctctaccattagttttatcgtctcctcattttcttaatctaaaatttggcaatagccaggcacggtggctcacgcctgtaatcccagcactttgggaggccgaggtagaaggctcacttgaggtctagagttccagaccagactgaccaacacagtgaaaccccgtctctactaaaaatacaaaaaaaaaaaagttatccaggtatggtggcgcatgcctgtagtcccagctactcaggagactgaggcaggagaatcacttgaatccgggaggtggaggttgcagtgagccaagatcccaccactgcactccagcctgggtgacaaagtaaaactccaactcaaaaaaaaaaaaaaaaaattggcaataatatcattcaactaacaaggcattaaatgaaataatatataggaagatgttagtgcacattacctatttagtgatggaagtgatatttcctcttcccacaactctgtgtaaccaaaattcctatcgatccttcatgtttcagcttaaatgaactctctttgagaggctttagttcccccattacactatctcatagtatcctgtacattttccttcagagtccttatcacaatttataattatttatttccacaaatgtatacacagttcatggcacaccacatgtacttagtaaatgttgaataaatgaatttatgagtggaaagaggtttataatctttccactggtatcattaaattctgtcattacgtaaatcagtgggatcctgattataaatgttactgcctataatacaaatggggtatttaaatttcaatttagttcttctagggacaactacactagagggggaaaaaagaatatcgctagtatttcagtctacttctacatatttaaagtcacaattatggaatcacaataattctctatattttgtcccacaatcttccatttaatgagtccactaaaataaggattaagaaaaatgtgggttctttcttggctttcagtttacctgctgagttttctttaagtcaccatctgctacggctatgattaaattagctacttattgataaatcggggcactacaagatgacattatataaaagcactagttttccaagtatggtctctggatcaccaacatcaacatcacctgggaatttatttgaaaggcaaattgctgagttcacccttgatttattcaatcagaaaggctggaggtgagacccagcagtttaatggttcagcaaggctctcaggtgattctaatgcacactaaggtttgggaaccattgcactggaagattcatttttttaagtcataggttgtttcactggttttcatcaatttgctgctctttatatttcatcattaaaattatattatttcaatatagtctctaaaatactctgaagtctgacaaacaggtcatctgtcagaatataagaaaggcaaccaaacaatgattgcttaacatacaattccatccactgcataatcagttcatgttgtcaatgttctcttttattcaaaattaattccttttacatctccttttaaataaaaagatctttgcttcagaaaagctaatttcaagtaaaattgggaagtgactcaaataagcaattactgttttcaaaggttttattagtcacaggaaaaaaaattactagagccaaaaatataaagtagtattgccactatatgtaaagatacatacaattaagtctaaagtttttatacacaaaactataaactgcaagaatacagtttactacaaaaacaaaagtatttctgagaaatgagaaataaaattgatatttctaatacaattagaatgtagccctgagattaaggattttgtgtttgttttattcactgctatatctccagagcctagaatggtgcatagtacacagtaggcacccacttggtaattgtgaatgaataaacaaaaaacatttgtatataataatcttctagattaaatgtggtctgcccaacaggtgctagtctaaaaactgtttcaagtacacaataaaatacaaggaatttgcaccagaatgtaaatcaattacattaggtaatttgtaatacacaccatttaatttctccttttatcacaagaaaactatttcaacaaaggaagcagggaattggtttacattttggctcaagctgctttctcacagaagaccaataatagtcacaaacttgctgagtaacactgctttagactaaatgttgagagtagaaatgagagggaaaaatagggggatgaaaactaacttcaaagcaaataataatttctaaaaataatttctggctgctaagatgtggtcataatcatattactatgccttttaaaggaagcttataaaacacatgaaaacaacaaaaaattttaaggataagctctttttgtcagctaaatgccaggttctaatcaggaaatttaagatatcccagtagtgtctaaatgaatgaagtctttacattttcagacggatttataatagctcaggggtccccaacccccagttccagttcgtggcctgttgggaaccaggctgcacagcaagagcgaacactaccacctcagctctacctcgtgtcagatcagtagcagcattagattctccgaccctatagtgaactgcacacgcgaaggatctaagttctgcgctccttatgagaatctaatgcctgatgatgtgaggtgtaacagttgcatcccaaaaccatacgccccatgtccccaccccaccaacccaggtctgtggaaaaaatgccttccacgaaactggtccctgctgccaaaatggttgaggaccactgtaatagctggtcacagaaactaagatacatacaaaaaaattatgctctaaattagtgaaaacacttcaagtatacaactcactcatcacttcagccactcccacagagactgccctcctacgctatactaacccatcaagatcacaacttcctatgcattctactaaattcaacacctaccaggcatacttacgtaccaggcactgtaaaacatgaaatttaaaacaatccccataatcagggagcttatggtgaggaagagagaaaaataaaaagatcactgtaacatagtaaaatgaggacttaaaagagtattataagttaccacagcacacagaaaggaaactgagtggagatgtcaaagaagacttccaggacgatgagatttccaaggtgatacttgtattttctgttacattttctgttcctccagctctcttaattactacttctactctacctagttttatacttcactaaaatctccaatcccttctccctccccatttttctccaaattgatcaactccatactttctattctatccctcccaaccagcccaaagttagtgatcagaacctccaacatctcaaatttcaatagccttctgccacatctgcccttcaaatacctaaattaacccaattatctttctttcccagccctatgcccagctgctgagcactttgaaaaagagtaatacagcctgttagaggccttataaatgctgactaagctcagctgagtcactgacaacttaggcaacaattagtatactcctaattagctttctgtccctaattctaccgctgacacaacaaacctttaccactctcttcaaactcccctacctcaaatctttgccatcccaaccagctgtcttgcctgcttccttaaaatgatatgaatggtaattaggcatagctgaaaataaatattacctgaccttttttataagcaaaagaagtgtactgaactacagcaatctaactaaaaatcctaacagtatttcattgagaaaagagtcagtcccaaaggacttacaaataacctttgatcgtctacctgacaatttcagccttagaaaatacaataaaaaatatgaaccaaggagtaagcaaacccctctcaaaactgatattatgtttatgcaccaaagatcaagtagtttttttcagaaaagaaagtgtatcaagttttcctagtttatgaactcttattatagatacaaatctaataaatttgattactatactgttgtagactggaagcaacattcaaaaggaaagaaggtgaaacattgctggagtctggtatgacagcaacaaaattaccagccaaggggagagaaaacaaaaactataaaaataaatctataaattcaaacaaaattacagattgggactatttatcctaggaacaaagtacattttatgcttctatgattcactaggacatcactgtattacaagtagagtactatggagcaactgtacctagtattctgtttataagtagtcatgaatattcataatctactgtagaaataatttctttaaaatagaaccatttgatcacttagatcatgtatttacaaaataaagaatacattaaatacctttattctttattacttatattgcatagatatctacatatatataattctattagtcagaatgcagttttatatatctataaaaaaattaaactggtcatttatttccagctatgactaccattcaaaattaagacaataactgcatgatttaaaattgagggaatagtttggctgatttttacatactgcagtcacagcacaattctacattctagcaagaaaaacaaatattaaagaaaactgagaagttcttcagagtctctaatagtacagtagttaaccggcccactcattagtcagttgtttttactgtttctctccagtgttgtttcaaataaactttctaaatgtaaaatgatttcattaatcaactttaaaagtaaaatgaattgcacagaccaatgtctgaaatctgagtacacagcaaaaagcagaaaaagaaaagaaaaatgaaactacttaaaatttgcacttagaatttgttttggaacttgataaaatgattcctaaaaattcatctggaaaaataaaaataggaaaagagtcaaaaatattttaaaaagaaaagttatgcggatggacttgaactataatactaactattaaaacatattaagaagctataataactaaaataatgcagtactggcaaaggaatagactactcaacggaacaaagcagaaaagtttaaaataatttattatctgataaaggtagtatttcaattctgaggagaaataaaggcttatataatttgagatggtaagtacactggcaaatcaatttgaagaaaaattattctaacttagaaccctccctgacatcataaaacaaaacaatggattaaatattaaaccatagaaactaaaaatatgaaatgtaagaaagtgcatgaagatatgtatcaaaatcaagggtaggacattctgtcaaagacagaagcaataagatatataagactgattcaactatatgagcaatgaaaactcatttttttttttaatcactatatacaaaccttaaggcaaccacgagatttaggtgctggcggggaaaatagggaaaatgccaaatataatcaaccaaaggtcagtgcctttagtatatcaaaggtccttaataggaaaaaaaaatacagtagaattatactaagaatacagacaagcacaaaagaagaaataaaaatggccaaagtattttcaagctcagttgtcaaagaaaagctgaaaacacaatatttttactgttaaaaattgtcagggaagatggagggaggtgctctcataacttgatagaaatacattagttcaactttcctgtaggaaaaattaggaagttagtatcaaaaaagtctttagactcaaaaattcctctatgactttcaaatagtaggtttcaagattccattatatcatttttaataatagtggaaaaactggacaaaacctaattacttaacagcagggattaaaaataatatgatagatatacacacaatgaaataaaaagatctgataacatagttgttcacaatatagcaggtgaaaggaaaaaaggacagttgccaaaaaagcacagtaatgactaaaaattactaagaacataaaaattaagtcacacacaaatgtacacaccccaaagtgtatgcctcgcttggaaaggaatcatagatgcttttatgatcttcttttttgctcatctgtgtgaggatctcattacttctactgccgctgctaactcattcagggattgtctcagtttccttggataataaggggcttcactgcatttaaggcttcctgatttattcaaacagtaactacacaaatgcacgcacacatacacacacacacacacacacacagtctcctatatgttgctatgcagagatctctagacacatttaaaaaaagaaaaaaaaagttttaggccaggtgtggtgggtcacccctgtattcccagtactttgggaggctgaggcaggaggatcgcttgaggctagggtttatagtgcagcttataaagataatgctgtgtatttatcaacatggaaaagtcctgtgatatatattaagtaaaaacccaagttacacagtagtaattataatatgggcttttggtattttttaattttttgtatgcattggaaagaaactggaaagataaataccaaagccttaatagcactttgaggttttttttggagacagggtctcactctgtcacccaggctaaagtgcagtggtacgatcacaggtcactgcagactcaaccacttgggcttaagcaatccttccacctcagcctcccaagcatcaggagccacaggagcatgccaaaagacctggcttttttttttttttttagagatggggtaccacagactggtcttaaactcctgggctcaagcaatcctcctgcctcagcctcccaaagtactgggattacaggcatgagccaccatgcccagctccaataagcactttaatttaatttaatttaataattaaggtgttaattatgaactttctgtattttctaattttttccttttcagaaaataatataaactgtctctatgaggaagtataaaaaatacttcatttattatagaataaaatgttgatataacagttcccctacccataaaatttccagggtttttcattgggggtgggggttaattgttcctaaaatataaaatccaccaatacagaaagaagtgaaccaagatcttgcagctccaaacctagtcttctccactgtatcatgctaccttaatcactcagatgtagcattatttttctttgtatcaatttgccttttgaaatatttatatttaattacaaattccagataagtgaagttttatttctattaaaaataaacattaactatgttcacatacttctaaaggattagagatatataaaagacattaatatgcacaaattctaaattggaagaggcagaataaaaaatactatcagtgcttgacttagaaatgggttgtattccaagtctgaatgtttggaaagtaattccaaccaaaaagaatgttatttttgttgaataaataaatattaattgattgccaggccaaccccaaaaatttaatttccccccctttccctattaaacacacattactaaccagtgtaatacaggaatagagagaaagccatgaaaggctaatagaactctactagccatggcaaaaactggttgtaacgtagttgttttaagacacagaaacctatgaaaggtaagaagaaagcagtcaaagataatagattctcactcctcttctctagaaaagtggttgtgtactctattctgtcataggaaaaaaatgttatgccaattagaaaactttctaatgactacaacaacatttttttcaaaggcatatggtatttcacagctaaggttttttttaaaatctacataggtgtccaaaaaagatatatttgcaaaagatggcatactcatttgaatatatattttttatatattttagtatattaaaaacacacacacatatacacacatatatgttaatatatgttaacatcttaaaacacattggaatatatcaattctcatttctttttttttctttttttgagacagagtctcactctgtcacccaggctggagtgcagtggcgcaatctcagctcactgcaacctccacccaccaggatcaagcaattctcctgcctcagcctcctgagtagctgggattaaaagcgtgtgccaccacgcctggctaatgtttattttttttttagtagagacagggtttcaccatggtggccaggctggtctcgaactcctgactgacctcaagtgatctgcccacctcagcctcccaaagtgctgggattataggtgtgagccacctcgcctggcccaattctcatttctttggctgtaatgtaaaagtgtccatcagtctcacatctagagataatcaaaactgtgctttggcaaacttaactatcatgggacttcagaaccagcaaaaagtcaaaatcaacaagatttattccactatattaagaatttactactcttttctaaaattacactcaccttttttaatttacagaatttactgtaacgaggcaaatcaatatataatataggcatcaaatattaatttcctatctaaaactactaaccactctctgatatatttttagtaatgaagaatccatttttttcttttctgagacggagtctcactctgtcgcccaggctggagtgcagtggcacgatctcggctcactgcaagctccgcctcctgggttcacgccattctccagtctcagcctccagagtagctgggactacaggcacccgccaccaagcctggctaatttttttgtatttttagtagagacggggtttcaccatgttagccaggatggtctcaatctcctgaccttctgacccgcccacctcggcctcccaaagtgctgggattataggcgtgagccactgtgcccggtcaagaatccatttttatctagtaccttttttattttttattttttgagacagtctcactctgttacccaggctggagaacagtggcaggatcatggttcactgcagccgtaacctcctaggtgcaagtgatcctcctgcctcagcctcccaagtagctgggactacagggcccagataattgcttttaattttattttctgtagagacagcgtctcaagtatgttgcccgggctagtctcaaaactcctggcctcaagagctcccctgacgtcagcccctcaaaagtgctgggattacagacatgagctaccacacctggtcccccttttctaaagattaattttgaagctggtacatttaaactaacaagttttcaaaatctcaccataataaaaataatgaattgacagaatactacataacattgctaattttacagctaccagaaattttgtaaatctagctacataaaaatgagaacctaaaactcacaatgacattacatattcaattacacatgctgacataataatgaagtgtaatacattcagagctacagtcataggatttttcagaaagactaagagtatatatatatataaatacattcacaaaagaacatttttaagaaactgaacacatttctttattattcatactttctaaaaaatggaacataaatgtaatattaaacttctcaatcaaatctgacttgccaaagtagccaaaaattaacatcttcaaagctataaagaactgtgggacaatgacaacttaaaaaagagagacaggaaaaaagtaatcaatgaccgtgttaaaatcaaatataaaaacaggttataacatgtaaaatgtatttttcccatctcaataaaaatgtaacagatgcaacccagaaaagaagcattctataaataatttgtatttactatatttcttctgtgctgcccaatatggtagctgtttgctaagtttatggctaaacttaaataaaatctacaattcagttgctcagctgcctggcttatttaatatactcaataggtacacatggctagtggctatcacaccggataaaaaggaactaaaatttctatcactgtggaaagttctacagcatgctataatgtagacaaatcctttcttctctataattatgaaattcttcccattaaattgcaaatatttccccctatacttgaattactttttataaactccttaatcagtatgttgatgatgatatttattttttaaaaagataatggtaacaagagcacaatgtttatcatctgccaggaactacactatgtgttttaattcaatcatctcatttaatcttcgtactaaccctgtgaggtagatacaggttcacagtctcttatctgaaatatgtattgcagaatataaagttttcagatttttgaaagttaatactgtacataaatcacataatactttcagcagagtctagagaagcattcaggaacatggtgaaacgtatgaatattcactctaaaaataaaaaaagactataaatagctatatatcaattacagcatggatctaccatcaaattagttcagaacagagactgccactctccagtgtgataatcagcaattatactgcaattttaggctgatgggtctgtgaatttttacctatttttccccatataactaaggattttcatcacagaattactcaaataacttcatctacctgaatttcaagaattcatttctgtaagtaagcaagacacttttttccctggtaattacacatataatcctaaactgaaagttctagttattatcttctcatgagagaattgatagtaatatttaaataaaaaaatcaattattttatgtagccacatttataaaataacattttttaacacaagcacttaatttcactggatctagaaacttaaacatttcctatttcatttctgaaaggaaaaaagactttccattatgcagtgtttttatgttctcaatctgcttttatacataatatcactttcaggaaatctgcctttatacatattctcacttacattacaatttgaaaatattcctaattactattatagttataaactaaagtatatcttaaaatatcccaaacagatgcatttcacaaaaagtaaatgggtaagtttaccacatattttagtgtaatttaaatatcaggaagatcaattattatttaacagtgaaaaaacacaaaagtaggatagacatttaaatattcaaataatatggccacatttgtatccaaaattatgaaataacacaaatacaagcatctaataagtatatagtaagtatataatttctatgaaaaagtatactttcttttggttactgatatgcccttgctgaaaaagatctgttgttagatataggaaactgcaacaaatgctatgataatataaaaatgacaggctgggcgcagaggcttatgcttctaatcccaaccctttgggaggccaaggtgggaggatcacttgagcccagaagttcaagaccagcctgggcaacacgacaaaatcctgcctctacaaaacaatacaaaaatcagccaggtgtggtggctcacccctgtagttccagctacttgttgaggcaggaggatcacctggtccttgttactaataaccgagcaatcaactgaaaaaacatttagctttcacattttatttcattatagcacagtagtcacacataaactgttgaaagtcatttataaactaaattttgtaaatcaaaataaaaagtttattaactgaaattagtttagcataagtgcaacagcacggaatctggagtcagacttcctggcattaatccagaatttgccactgactataggataatatttggtgagttactcaacctttgtggctctattctttcgtctataaaaggggaataatagcatctaccctcacagagttgtgtgaggatgaaatgaaatggcatatggaagtactcaagagagtgcctggtacacagcatgttctatacaagcattcattattatcactgatattattaaagcacccttggaattacagtatgttcgtactttttaccttcagggtttttctttctcccagtttcctgaaaaacttaaatgaaccaggggaacaatatttgaaggaagcctgtgttagcttaaaaacccatctactaaaaattcagagactatacatatcagggctctctaaagtcagatgaagggggcacacattctttcacagctcatatcttcataatacttaaaaaatagtcaaatgataccatttcacatataaaacaaagctctagtacactgcagcaatgaataaatggtcattgctatttatcccaaacactctcaggagaagaagcaaatcttactgagaaaattgttagttcagttttggacattctaaatttgaggtgctcgcagaacacttaacagacattccaggaagcgggcagaactacagacctaaacgtaggtagcttatcctcagaagagttcctcattccctcctttgtactaccatggaatttttcgcatcctattgcattacaaatatttgtctccttctctactgctagactatatgcctcttgaaggcattcagttcctgccatataataaggactcagtgaatgatttttagctgggcacagtggcacatgcctgtagtccaagctactcaggagatgggggcaggagggtcacttgtgcctaagagtttgaaaccagcctggcaacatagagaccccatctcaaaaatacaaaggtaattttttaaaatgcaaaaattgcagaactgtacaatttttaaaatgtattttattatatataagaaaattctgattaaaatttttttaatttgtggatgttagataaggatgaaattttcatttggaagaattcttacaatataaaagtaacatgtaaacaagattttttcaatgttattgctatttatccccaaaactcccaatttttaaaaacgtggtgacattataattactaagcactactgagctgtgaaatctggcatcattatcatcaggcctgtaactctgaaaaagtacatgacaaggcaagaaatatataaatgggtaaagtaaggaagaactcagagaactcagtgaagactctcaaagtgcatttaaattaattaaaattcttaagaagtttgttaaaatacctgtaatgtcaactgaaaagatttcactttcaaatttacaggctgcttgagttcaataacctaaaaatgaaaaacctctggaccattccagtacaggttattcaaaggagctgtgataaagagcatatagcaaatgtgctcagttatatgcactaggtaaggcacaactgctatcatcccaacccactaacacttgttagactactaatcctttcctttcaaatctgtaagaaggggccaggcacggtgggtcaagcctgtaatcccaggcactttgggaggccaaagcaggtggatcacttgaggtcaggagtttgagaccagcctggccaacatggtgaaaccccatctctactaaaaatacaaaaatcagcctggcgtggtagcgcatgcctgtattcccagctacttgggaggctgaagcaggaaaatcacttgaggccgggaggcagagtttacagtgagcagagatcaggcaactgcactccagcgcctgggcaacaaagctagattcctctcaaaaacaacaacaacaacaacaacaacacaacttctgttaagaatgcctcactggtgatattcaccacccaaattcaaaatatggtaagttcttcaaggctctaatactaggacagattggttgccagttctagatttaatagcagatcatgactatttcatttgtgcttgacaactagacaactttcagtgaaaccattccccagaaatgacactacaatattgttacttatttagacaccagggagccaaaagaacaacaactcattaatagtgaatggattggggaagacagcagcagaggactgaaaagcagcaatataaacaggcttagaactatgaacagcagcagtagggagtcacagaatgaaattactgtaacacaaaataaacatagcagaataagtccacactttctcatttgaaatatacataagcaagaattaaatgtatattgagtctaattttatacaatcaaaagcctaaaaatctcataacaatagaaataccagtaaatttaaaaggattctcccaattttggccctatttccctgttctataaagaaattcctaagggcaaaaaaaataacttcagactataaatgatgaatgtaactattaggagtggcctctctatgaggtctgaaatagaaggaaaatgtacatttcttccagagctgtagccaacaataacttttgcattccgaattcagcttaggtacattggttgggaagatgtttgcaaaagtatttaataagaaagtgctgaatttagcctttattttttctcagtttttttaaaatggcccaaggtccatcaaatgcactaaatagaagctctcctaagtataaataacaaaagaatataatactctacagcttttaatttaatttttaatttttgtgggaacagtttggtttttttaatattttatttttaattttggtaggtacataggttttttatttttatttttaatttttgtagtcttcttcttaaaggcaactgtcttttacagatcagagattatcaaactttttctgtaaaagaccatatagtaaatattatcagctttacaggccatatagtctctgtcgcaaatactcaactctggcacagagcatgaaggcttcaatagacaacagatagatgaataagcctgggtatggtacagtaaaaaattatttacaaaaacaggcagcaagtccatggccataatttgttgacttctgctataggacatctgtttttaactttactaacaagtatattgttttaataaatactataaattttgaaataagatgtctgggatttgctttaaaatacttcatatttttttaaaaagggagagtagggagaaaggttaaataagactggaaaaacacaattattgttaaagccagattatggatatataggtttcattacactgtaagtttgaaaattcccaaattaaaagttttaaaaatacaaagtaaatcaatgaaccagctctacagaaaatgaattttttcaccttattctaaaccttttaaaacatgcttagtatttttaaacataattaacataacacaacataaaatattcttaatataaagccactaaactataatgaaaaaaattaaactaatccacaaaaatgtatataagcataaacacttataattttccataatttaaaatataggctcacttcacgcagttgctaaatatgtcaaatttattggcatctcatctgaaaggtgtaatcaatttttggctttagaatatttttataagaaatatattatttatattaacatataacaggtttactacttttcaagttaatgcataaatttctttctttttaaattctaagtaattctggccaacatggcgaaaccctgtctctactaaaaatacaaaaattagccgggtgtggtggcatacctctgtaatctcagctacttgggaggctgaggcaggaaaatcgcttcaacctaggaagtgaaggttgcagtgagccaagattgtgccactgcactacagcctgggcaacagagtgagactctgtctcaaaaaaaaaaaaatttaataataaattctaactaataaatattaatagatataaccctcataaacaaatattcttcaggatcttcaatgattaaaagtataaaaggatcctaaggccaaaaagtttgagagctcctgaactaagtgttttcaatattgtataaagtaagttgatcatgcaattataagacatctgctcaaactcattttaccttttaacagtaatcatcacatagtgacgttaattcaactatgaaggctatcaatttagccacaagaggaagacacttaaaccttcaacagatatattcttttcaactacctgttaagtcatgaataatgtatccacaggaaaagaagagcactataatatcttgccccccaccttatacagacaaaattgtctcctgaaccaatataatgaaaaactactatgtgtcaacagacatttctaataaatatgctacctcttatcaaatcaagagatatagtttcacttaatgcaagaaaccagaaatcaagatgaacagagccttaagaaatcttaatgactctgcaatttcccaaagattgaatacatgtttttcaaatgctctaagtttttccccaatgctctgaaacacagtgatttcaaatattatcagaactaaaaactaatttaaattaggcttactgaattattacaagagttgagaaaaactaagaacttccatgtgaaaacatttcaactgtccaagaatataatcagtctcaaaatttcctaaatctataaactagaatagaaataaacaatacataacacagactcaggcaaataattagagcaattgtgtccacctgattattcattctatcatttataaagatgaactaatactcatttttcaaatacagtaccactgtagcatttttaaccaattttgcctctacatatggcaatttaaaatgttaccacagtatttcatttttacttgattaataacaaattatttccaagttaagttttataaatgttgttatgtctattgtctttcaacatgaataaatttaaaatagtaatagcaatagcatgcagggacatacttacatcatactctgtaattctgttgcaaagcttatagacttccctgtactccttccactacttgaagttgcagtagacattggactagctgccgtattattcatctaaataaaaaggagaaataaagcttacaaaatgtacctagctataagtaaatgcaaaaaaaaaagaaagcaaatataaattacttcaaaaagtagagaaaatttaaatttctgatttgttttgcacaaaactgattcacttatacttaatgttctttattaaaatgaaatagcaaggtggaaaaaaactagtcaagtaagatgtcagccaattactcacttcagtgataaatactttagcacctattttacaataggtaatgtaaaaacagtatttattaacatattttactagagctcattggttttcaaaatgtgcttcagggagccctacggttcatcagcaatgcttcagggcattctagatggaccccaagcacaacacactcccagtttcattcaggccacggaacaaccctgatttttctagttgatatatgaaggttccaagtaagatctcatttaaagaaacaattccacagctgaaagatacaaaattagaaaactacagcataatctaaatcctatttgaacaaaagcctaaaatacaaataataatgtcaatcggtagatcaaaagcattatattttataatcctatgggtaaataacttactcaattttaaatgtgacatttttcccaataaaattaaggtgatgcataatgataaagtgggtgccaatcctaatgtatgacattttatttaatgcattaaaaaaattggcaagatttagtcaaagtaacattaaaataatgtcatgaaagtaggtaaaccctcatctattacactattatactggaagtgctcaataaacattagttattatttcatatgcttgcataaactttgcaaagctgtaattttcctcaaaatattttttgcagtttctaaagaagaatgtaagatatttagaacatatgataaagtaaagcagtgcagaggactttcagtaaactaagagggcaggttctggggtcagactgcctagatttgaatcccagctccgctcctttgctaagactttgggcaagttacctaacttctctgtgcttcagtttcctcatctgtaaatggcaacgataatctcaccttcttagggctgttgtgagaattaaatgaatacatacaaaaatttagagcagtactgatagcacacagtggatacacaataaatgttagctattgtaataagcagaccttaagaactccctcttccgttaaaggggaaagttaaagaagaaaaaagaattcccctcctttatctgctaaaaacttttatataaatttagatgtattaccctttttttcacaatcaggcaagtttttaaaacttaaacatttttactaaaagacctctatgcaactaaacaaatactaagtagcttctttataagttgagttttcactgatgacatcactacaactactagtcacttgggctcaaagtctcagtcactacctttgactccttctcctgcaccctacaatttgtaagaagtcaagtaaattctactttctgtatgttctcagacccttcccctcttgtcctacggctatggccttctaaaaactcttagctacatcttctatctccatctcagttcattctccatactgctgccaaatttatcttcttaatatatctttctaatctaaccactcctgtgggtaatgataaaattcataaagggaatctaaaccagggtcacttaccaagggctgagatggaagggctgggccccacgaaagaaggttggggaaaaaaagctactacaaatcactgatggagataggctttatttgaagcttttgagaaggcgacaggacacagatctaaggcaagcagcacactagctaggtgactaggtttggaatatcccaatatccctctggtctagtctgagggccctaacagccaggccaaaaccactataccaagaaggcaagagcacaaaaagcgaaggaaaacaaaaacgttccacttaaactgagcccgaaaaccaaaattctaaaacatatgaagaacataatgctaagaaagaccatcgctttttttaagcctaaatttgtgccattgtttaaaaagacttttggaataagtacttttctctacaaataacacaggaaaagaaacataaccatttgagactcggattaaaaaaaaaaatcacaagtccaagactgggggaaaacaggaaacaaaggacttccctaaatagtcctgcagaattgggacaaaatgcgaaaaaaaggagcctggatttctcaaagacctcaggaaatgttcccttgtctcaatagaaggctgacagagctatcttcgagaacatgttaaactcaaagagtaagtagtaaccccagcctccagaaagttatgatttgagttgacttgtctgatttgacagacatgccattccatgggattatcctatggtcaaatgtcctgagacactgctggagcaatctgctcctttttcattttcaaatccagtcaccaaacctagtttattataaccatgatcatcctttcacagtcaagtcaatttttatatcaaacaggtgaataacatttttcttgacatgatgagctgataggtcattagactctttaaaataattatttcccatacccacattgtttgatttagataattaacttcttttgacattaacttctttacacatcaaagtcctatcattccaatgctctatttcctttcttctagacattaaaaaagaaaagtctgttaaaagcagaagcactcaagtcaattttcactaataaatacagttactgtggaactgaaaacctactgtaatcttttcaatgggttaatgtcctgcagttgtttcagctttcaattgaaaatgcatctgtttgccatattttacaaaatgaattcagatgtgcagattgggacctagattatttcaacatgccagagtttaaatgtgaacccaaggaataagttcatatctgattaatagtatttaaacctgatcattaagctaatagctaatattataacacacctgtaaaactgtgttccagagaagaaaaattggcatttacctttcaatttaaaatgaaggaatttaaggatgcacgcctttcctcagaaaatattgctatcaaaaaaaaagttttaattgtagtgaagttaatcacaaaaagtgagttaaacaaaatgcactgaacatgctactgggtttctagttagatctcatattttgggggactaaatgaccacagaagaaataccatgaaacatctttaagcttaaaagacctcaaattgttgagaaccttattactagtttctgcaccctccaaacatcatcaaaatctggactgtgaaaactatcagtcaatccactaaaagagagaagttttaatcttttcttctatattgctgaagaaaactatttcagcagacctatgtactgattttgagcatctacagagtctcaattctaatgataacctgaacatctcacataatataaattaatagaaaacttttataattagaacatttttattttcataaaattccaaaggcaggaaacaattatggttaagccaacactattatgcactgagttttcgttttgttgtttaaaaaaataatcaggttacatcatgatctaaatttcttctgatgtgaaaaataataccaaatggtcaatcactgagaatgaaaaaaattaaaaattaaatacataaaatatctataaaaacttctagacctagtgtttagaataacacaaaggtaatctcaatatattaatatatgccccattttaagtggactttggaaggtattaaaaagcctggtttataaacttatctcaaatcagtcacacctgacctccccagcctccttttctaccacagtcaaatcaaactttcactatctccagaaccattccatgttcttttgaacctttacccctacagttctctctacttgcaataccttttgaaacaatacagtatctctcaacctacccaaactctactgacctaagcccatctccaagaaaccttcccagatatgtaaacaaaagaaattctttctctgacatctaattattttagtttatattagtttaatattaaattactttagtgcatactaattatttttgttgaatgagcctctgtcccacagtgaatccctcccctagctatggacagttgacatcatcttctacttccagagaaataaaaagctatcatttagtcattccctccactctcctccaccaaagacagtgtatcgtatcctcccttaattccctcctcttataataaagacacactcttatttaaagccaacaccaccagtgctttggattcttcatatctaagtatttacggggcacctactacaggccaaacaccgttctaagaggtagggatatagtagtgactaagtcagacaaaaagaaatacattataatgcaagagacaagcacataaacaaatataatttgaggaaataacaaatactatgaaatcaaaaaaacaagttgatttcaactgggaggtggcatttaatataagatctgggagggagctctggagaacttcccaacagaaagaacagcaaagtaccaaaatcctgtggccagtgtggctagaaagatatgaacacaggggtagcaagagggcagatcttataaagcctttaggccacaggagtttacatttcacttgagtgtaatgtgaagctattagagaattttgaaaagggaagttacttgaaatgttttaggtttaaaaagataactccagcagctgggagaatatactatatggaagcaagagtgcaatcaagaagaccagttaggaagttattgaggttgtgcagacaagagatgacagtgggttgaattagtttaacaagcggagatgatgagaagtggtcagatttctggaatacattttgaaagcagaactgatttgctgatggattacacgtggggtgtgagagaagcgcagtcaaggatgaccgaattctggagccttagaaactggttgaatggtggtgccatttactgagatccagaagactgggaaggaaaaaaaaaacagttcagttgggcctatgttaagtttgagacaactattagacattcaagtggagattttaaaaagctgcagaagctttgtgagagatgttgtaaagcagaaaactgaaataaaagccatggtcacaagatttttgttaaggataattaatcaatataatagaactttgtataaggatataaggatcaactaatctcataagttcagtttctctgtcaggaataatttatctcacaggaatccatataatgggcactaaaaaaaatctgaattgaaaatatcaaaacaccctgtaaacatgaaaactacccccatcctttctctctggatgataaacagctaaaactgtgcagcattacatatcctacctgagcatctttttgaacagacataggagcccagtgatagactgctccgagacacaggagtttctagcatatcctccttctttagtctcacattaagtttctattccatatgctttcatatccagtactctcacagaaaaattgagtttaaaaaaaaaatttctttgcaaaaacagtccctaaggtgcactgcaaatgtgcctatcagattatccttaagccctgacaaatggcacatagcacacttacttttccaacattaaaacactgttgttcttacacaaacttaattaaagagttacttaatggttaacttttgagatatgtggaagattttggcagcaattatactcctaacagtaagaggtaagtgtatttgacaaacatgtcaaaaaaataagcagctcccttaaaaatcaaaactctcttccagtctagagtcacatttcagaaatattaaagcttatgagaattctgcattaaacataaacaatttacaaaatatctgatgtgtttaaaaacagtttatgtgaccaaaaagaaaaaggactgggggatttactgtaggcatgtaaaaaatagaggaatttggagtttataaagggtacttcaccagtattagctcacttttttttttttttttcacaattaccctacaagacaagtattctccctctaccaatgaggaaactaagactggctgaaggtcacaaatccaataaacaacaggctttgatcccagatagcagataacctgaaatattcaggccatttagatatactatgttttaataacaatcctctcattttagtgctttagttttttcattagtaaaagatctctatctcctaaaacactaaaatattgtgaaattaactgaaaagttgtaaacatagcagtcaggggacttacatggtcattaagttatcttggagactgatgactttaaacactcagttaagaaattctttgtttaaaagaaaatcttaggtagatggataagcaactataacagacaaacatatatgcaaattggtgggagggaaccaaagacatctgagcagacttcagaactacagtttgaaaatcactaatttcctccaaatccctcatttttcaggtgaggaactgaagtccagaggggtttcttgaactgcccaaggacacactactatttagtgatacaagctgggactaaaactgaggtcccccgacacctggtccagagttctttctactatacatcaaagaatatacaaataaaagtttatcataactaacccaaaaggcctccacaatgtgtatgtcacagtgaactgtgttgtgaaatattaatatctgactatgccaaaccacaatggaagcagtaaagagctaggctctggagttaaattataggctctaacacttacacatgaccttgggcaagttatgccacctcactgcctcagttccctcatctctaaaatggagattaaaattacttctcttataggttacataaaataacatacgtaaagcccttagtaaaccgccttgtacatataaggcatttagttcatgctgatgatgatgattaactcatgcaaaagcatagcttcttgaaaatatatcacaaaagattactgttaaacatgtatattctcaaagaatgttatgactaagagtagacctttaaagactaatatgaataaagtgaaatatacagaattcagtcataaaaccactatagcatttaaatcagcaaaagtacatttcaagattttttaatgatttatatttgtatgttattttagtttataaagtatattcacataaattgtttcaatttactgtcctgtgaattcaacagcatcttttcagtaactcctacataccatacaccaaacagagtactattttctttttgagacagggtctctctctgttgctcaggatggagtacagtggcacaatctcagctcagtgcaatctccacctcctgggctcaagcaatcctcccacctcagcctcccaagcagttggtactacaggcacaaaccaccaagctcagctacatttttttttgagatggagttttgctctgtcacccaggctgtagtgtaatggcacaatcttggctcactgcaacctccgcctccagggttcaagcgattctgatgtctcagcctcccaagtagcaggtgcacgccaagacacgcggctaatttttgtatttttagtagacagagtttcaccatgttggccaggctggtctcaaactcctgacctcaggcgatccacctgcctcggcctcccaaagtgctgggattacagttgtgagtcaccgcacccggcccagctaatttttgttttaaattttttctagagaccaggtctcactatattgcccatcactcttaggctcaagcaacccgggcctgtcttggcctcccaaagtgctggtattacaggcatgaagtcacagagccggccacgattttcatgttcattatcttatttaaccttcactacccattaactatgggccaggtattttcagagggagaactacagtacaaaaaagcctcacagaccaattctagaaagtaagagcctcattagtataacctattaggtgggaatatgtttggataaatgagatacaacggaaggaacacatcaagtgcccaagaaaatgttggttctcccttagcagtagtatggggttgttttccgtagaaaatatattgtgaccagatcaaaaaagcaccattactgtgacttaaaatattatttgtgtgtgtgtgtgtgtggtttttgagacagagtattgctctgtcgcccaggctggagtgcagtgcacgatctcggctcactgcaacctccgcctcccgggttcaagcgattctcctgcctcagcctcctgagtacctgggactacaggcatgcaccaccatgcccggctaatttttttgtaattttagtagagacggggtttcgccatgttggccagtctggtctccaactcctgacatcaagtgatccacccatctcagcctcccaaagtgctgggattacaggtgtgagccaccacacccagcctgtgacttacaatattatttgtaaaagagaactgtcttcagtaatagtgcctattatacactatccatgctgttacacaaaatttacacaacaatttttgcaggtcactctttagtggaggctgaaggtagacaagatgagacaaaaccaattcaatataaaaatgtttgtaaagtaagacgataatttttaaatgtaattctcatttgatgccaccaacagtcctatgagaaagcgggatgaggatgggtactaattccattttactgataaggaaattgaggctctgatattaataagttaaataccttaactgaaatgacaaaagaatgtgccagaaaagggcaaaagctaggtttacagaattgggtcttagtgctctgttcaccaacccacataacatctcagaacattattatcacttctagattatccaataaacttaaggctacagcagctaacagttactgaactgcacacaacccatcacatgagttatttaaattaacctcttatgaacctagaagcagatgccattaccatcttcattttataaatgaggaacccagtattcttaggaagattaaataatttgtcccaaatcacatggttaggaagcagcagagcgagaactcaaatcaagtgttagagcctcaataaaatattttacccacttcagtataaacttaatataataatgcatatggctgaattatttttcattaagtaaactgtaagcaaaacccttctttaacattctaatacataatcagatttctgacggatttcactattcaacctcaccataaaataaaatcagtgttatttcaacacaaatactcaatcacctgatttgactgacatagactaccatgcagtcacccccaccaaaagatgattttcttccagagggaaccaaaactcaagctgctaaaggtttatattcaaagcaaaattttaaaattatcagtggcttaaatgggaaagtcacttgctggccttattccaggtatcttatttattatttagacacaaaaacagtaattttgtcactgttttaaagtatatttctggccgggcacggtggctcacacctgtaatcccagaactttgggaggctgaggcgggtggagcacttgagatcaagagttcaaaaccagcctggccaacatagtgaaactctgtctctacaaaaaatacaaaaattagccaggcatgctggcatgtgcctgtaatcccagctactcgggaggctgaggcaggagaatcgcttgaacccaggagggggaggttgcagtgagctgagatcgcaccattgtactccaatctgggcaacaagagtgaaactccatctcaaaaataataaagtatttctgatattgcaatgtggttaatcatcctaaaactatatattacaagtcccaacaaggctaacagtagggtgacattatgatgtggtcccaattcgaacattttgatagtgaaaggggttctattaaataaaataattgtgctggaacaatcaggctttatactacgactgtctcagaaaaattaagatactatagtcacccataaaagcaccccattctgatttgtatattatgagctattctctccatctgatttaactcgtgagctttaagttattgctccagatctaacaattatcttcagccttaagaccaagagcatcatttttttttttaaagagacaaggtctccctctgcagcccaggctggaagcctggcctgaccatgattcactgcagccttgaactcctaggttcaagagatcctctggcctcagcctcccaaagtgctgggattacaagcatgagccaacgtgcctggcccaagggcaccattttacagacatcaggccaaggttaagggtgctaccgctacctataaaggttttttatttgttcttttagttttattttcaaatttgactttatatacacttgctttaaaaaaaaaaaacagatgcacatatttcaagtaaagtaattttgtgaaacatctattacctaatttcacttatctctccaaaagatttggataaccataaaactagttctaaaatgtcctaatgctcaagagttacaatttttcaaatcgctttattacacaaaaggttaaaaaagaaaaaaacttgaataagagctggaaacttctcactgaaaaaccaaccaaagtggtaaaagatagcagaaaccgacaatcacaaaatagtacaataatgtttaaagaaaactccagttaatactgtcatagctctctgaatctggcattagctgtacaacctaggagacaacgttttgctttaatttgtcaagatgtaaataagtactaacagacccatggtctgaactgcagtatttgaatgaaaggcattatttgaatataattacaattccctatggcaataaatgttccaaagagctggcttatctgatttaaaactcaaccatatcaagactcggaaggactctcaaaatctaaattgtagccctgtgctgtccaatgcagtagctaccactagccacatgtgggtatttaaacgtaaatcaatttattaatttatgaataaaattaaaaattaagttcctcagtgacacttatcacatttcaagtgctgaagagccactgtgcctaggctaccactagtgcctaaaggcacagattatggaacatctccatcaaggcagaaactgctagtgaaaagtgcagccctagacttaggcatacttcgctccaacgtcccgaatatcctgagataagaaactttccatagcacaatgaagagcattccattcttgcaaagtactctcacgaactgtttctcataggcaaattcagcctctttgaaacattcaccagaaattccccaagttttgtccttcaagtaaatctttgcagggcgaatttaattcctcttccagagtctgcccttcacatatactaagaccccaggtcctctccttccaaatacatacatacatatatacacatacatatacttatatacacacatatgtatatacatatatatacacacacatttctttctaccgaaataacttaacatttctattagcctcttggagaaatgctaatttatccacgtgtacagtaatactacgtccaggatcgtctgagtgtcaaatattacatatcactgtcttcataacttcactctcacgtgtgagaccaagtgtcctgattctctgagaaaataaggtcacagtcattctgaactcctaaaacgtggagagcaaaagcagagctaatatgtactgagcagcacctggcgctgttctaagcgtttaacgtgtattttctcatataatcctcacaattctgaaataggctataagatcgccattttacagaccaaaacaaggcaaagacaagctaaataatttccccaggggtcacagacgtgagctcaccccacagagaacacagcggatcttttcctctttctggatgctacactcccactaactacctaactcttctctcgccgtgccataaagcaacaatttccctctttaatgattcctccggcagcccccacactacctagacgacccgcgcaccccgcttctcagcacagcccagcccccctcaccccacgcccacccgccaaaagggaggagtcgagaggcaactccacgctcggcagcggaaccagggcgctgcgcccggccagcgcctcccacagccgccctcccttcaacactccggcgtagaccacgaagacccaggcagccgccctcgagccggggccagggcgtggccggcgcgggggcccagcgacgctgggatctccgctctgcgtccctcccggctctctgacgtctcccccgcccgaatccccgcaccgccccccgcaagccctacaacctctgctttaagaacccttggaggcactgctgcgcttcccgcgaggagaatgtgggggtggagatggtgcggtttctgctgctgcggcccgggacacgcttggaaaggggcggggtgggggactgagagtgtggagtgtagaaagggaaaaggtgactcggctgtgtgacggggcgatggggggggtacaagatggcgtgagcccgactctcggtggggcgggggttgcggagactgaggagtaagcgatacggacgccccccgcactggcagtgcgggcgcatgcgcgcttggccaggtggcgcgcgctctcccagcccgagcgagctacttccgccacgctcgccgggggcggggcgttgtgcgcggccttcagggcccggcttgggcagcgctgagccacgcggcggcgtttagagctggggacgctgggagcggagtggggacgagctgagatcggtcagggtgtacagggtgcaggcttgaattctttaggaattgggcccgagagggctaggatttttgaaggattgggtgaccggcactggaagttgattttcaactccgaggaagagattcaccgttctaagcttctttccaggaattggagtgaacgggatcttaatgggattgcgcgtttacaatggtgaagggaaacggaggggtctgaacgctccccgcagggccgcagtacaggcgtgtggatgtggaaccctttctgggacggcgaaaccagctcttacgccgcttccgcgcgccatcactccctaccctgacctcgcacagaatctgtttcattaatctgctattaatgttttttccccaactcatgttactagacgcaggcgtttaactaccatgttttgttattgaaaactttttctacttgaaggcttttttttttttttggacgattctgtgtttagattttggcctgttcctcattttaaaatcttgcacccccagtattgtactgtacattctgtcctgccacatttaattgatatagatgtagttctttaaataatacagtagtcgtaagacaatgctttcagtctttcactctttatattatatgaagtcttatttatatttaacattcttattgcctgcttagagaagaaaactggttatccatgctcaccttcacacctgtgttgtcaaatactataaaatactgtattttatagggattcaagtattaaccctcaccaagtctttttaagcatcactgcttcagttattttcttgcctatagatactgtgagttctgaaatcccttccttctatttgcttaaattgtttaaaatagcaacttatttggttatttcctctgtggattgtagttgagtctgctagtgttgtgtttgattctctttaatctccccaacgcttcaatatttgccaaatacctaaaattccaaaagaatagatatatttaggatgtgagagctcagcttgatgtgtaaatcagggatcaattcattgctgagcaaagtgtgcagtataagggaaagtaacagagtgagtatggtgataacttcttacatgggaagactggttgaaagctcttttgagtacattaccaagaaattagttaacagaagattaagagaaaaattaatgttcacatctaaagaaacataaaagtagatcatttcaattaaaattatgttcagttaatgttatcatagaagttcctgcactggagtttcacctgcatcagatgagtacctgtttgatccagtttatcaggatagaatccagatcatcttattctaggatactggtgtccagcctgcataaaatcacacacaggccaggcgcggtggctcacgcctgtaatcccagcactttgggaggccgagacgggcagatcacaaggtcaggagatcgaaaccatcctggccaacatgatgaaaccccgtctctactaaaaatacaaaaaagtatccgggcgtggtggcacgtgcctgtagtcccagctactcgggaggctgaggcaggagaatcgcttgaacctgggaggcggaggttgcagggagccgagatcacgccgctgctctccagcctggcaacagaactagactccgtcaaaaaaagaaaaaaaaaaatcacgcacaacaaaagttaatgagagtgacacatggagaagggaaactgagttaaggcattgatacaggaagtttaaaaatttattcttaggaaactgaattgggctgttggcagagatctgatttttaaagtcacatgagttaaccaggttcctacctcctggaatttcttaaaatccatttttgaaaatctgatttagccataattttgctcatagtttgagaccattgctatatacaaagggccaaaaatatttttgcattacattcatatcaaatatcctaaactatcaatggtactagggtatcttaattataacaaagctaaaacagcgaagctgttgctgaagttaaggctttgatgactaccacctctcagaaaaacaagtgattttccaaggcatgtggggaaaacacatcaggagaccaagttaatttatcactccacaaaaatgtctccatgacctggacaaaattgttaaagaaaaatgaagcattgttagcgtagactttaacgttcctctggcatgtaatattcacgtagactcactagtgcaaagagaaagtgcatgtatctaagtaaaagtgcccatgggcatcttaaaatgattaggtagtaagcccacattctcaaaagagcagcagaagtcatggctaatatggaaccatctctctgattccatggaagtggtttctttttattattattttttgagacagagtctcgctctgtcacccaggctggagtgcagtggcccgatctcggctcactgcaacttcctcttccccaattcaagcgattcttctgcctcagcctcctgagtagctgggattacaggcgtgtgccaccacgcccgggtaatttttgtatttttaatagagacggggtttcaccatgttggtcaggctggtctcaaactcctgaccttgtgatctgcctgcctcggcctcccaaagtgctgggattacaggtgtcagccaccgcacccggccagaagtggtttcttctcatgtggatgctacagtgacagttcaggtgacttggaaattctttgttgtttgagattcataactcttacttgctaggatgtttgtggggactttttattttctatttatcaattatttcatcctttgctatatttgccttctatttttaatgcttaagttgtcaccatggaaataaactgggtagattgcatattgtttagaaccgtatattgcaattgttgctatatttgttttctgacgttgagaactgttttccaattgcattctcaaaagtatcttgttttatgtttagagcaagttgttctgaccaaaaagattactcagcccggtagtacctgagcaagtcacttaacatcattgcaccccagtttttgtatctgtggaatgagatgatagaaccaaatgaactaaaaccttacagccctaaaattctatgttccttcaaaatgggaatagccaaaggatggatactaaagttgtgcagaataatttcagcatttgtgctacaaaaattacaaaagtattcagggcttttcttttttttttcttttgagacagggtttccctctctgttgcccaggctggagtgaagtcatgcagtcatagcttactgtagcatcaaccttctgggctcaagcaatccttccacctcagcctcctcagtagctgggactacaggcatgtgccactacactcagctaatttttaaattttgtgtatagatggggatctccctaggttgcccaggctggtctcaaactcctaggcttaagagatcctcctgcctcagcctcccaaagtgctgggattacaggagtgagctgccatgccctgcctgatgttacacatttcaaaagaaaaaccagcgtgaaaagatgtatcaaatatgctgatgcactgcagggggttggggtgccacaaaattattaaggtgtaatcaaattggcttcccctaccttccaattgcattcataaggaaaagcagtacaatgattagaaaagaaatgttaaaaaattttacagtaccaggtagcttgtagaattgtaatcatgatcatcctcttagggacctatcattgtagatttcacagtccagtgtcttttaaaagtagtgcttggctgctgaaaaaatgattatgtttttgagagtcagaatggtaagggaaccatggaataccagagtttcaaagagcctttgagctcttcaggcacatgaaaacttagttgttcccgttcccatggaatccaatatgtaaaactcttgtactggaatcaaacaacttctacatttcaacggattgttgtaggcctaccatgtacctgacactattctcgaagctgcagatagagcagtgaacaaaacagacaaaaacatatgccatcatcaaactcacatgcagaagttagacaataaaaataaatgcctaaaataaatacctaaattatatagtatgttagaaggtcatgagtgttatcaaaaaagtttatacaggaagggatgtggaaggagaccaagcacaggagaaatggggaagatgtcatttttaaattgggcagttgaagcaggcctcactgagaaagtagtatttgaagaatgacttgaaagtgaaggagatacctgcacatatctgaagaaagagcattccagactatgagaacaacttgtgcaaaccgtagggtggggacaggtctggtaagttgaagcaactgccaggaggccactgtagctaaagaagagtaacccagaaagaaaatcatgtgatatgaggtcagagaagcactaggccagatggtgaaaggccttgtgtgcctgacactgagaggctattggcagaagattgacatcgtaagatttaggctttaaattggttaccttggctgccaggttgaaaatagtctgtagagtgacaggtcctattgcagtaacccaggcaaaagatgatggtagcttgtactagggttgttacagtagagggcttaagacatggttgggttctgggtatattttgaaaaccaatatgatttgttgacacattggatttagggttctagagaaagagaggaatgaaggatgaacaattttgttcagagcaactggaaaaattgatttgcctacattagctgagatggggaagattggggttggagtatgctgggcaggtgcaagagatcaggaatgcagtttggggaataagtacataattaagcatgatgtttgtattatctttaatgttttgccatcaaaaataaataagttctgggccgggcacggtgactcaaacctataattccagcactttgggaggccaaggcaggtggatcatttgaggccggttcaagaccagcctggccaacataacgaaacctcatctctacaaaaaaaacacacaaaaaattagccaggtggggtggcacatgactgtaatcccagctacttgagaggctgaggcaggagaatcgcttggacccaggaggcagaggttgcagtgagccaagatagcgccaccgcactccagcctggacaacaaagcaagaccctgtctcagtaaataaataaataagttcttaaggaaatgagaactttgaatttgtaacattctataataattaaattaatttctaatcttgctcatgtaataaagttccatttagacctatctaatatatgtcaaggaatacctttaagaaagtttgagaaaagctaaacatccccttgtttaaaaaaaaagaaaaagaaaaatattttttggtctattaatccatgaaagtagagaataaagttaagacgagtatacagaaacatccagttctccaaagtattttcattgaaactgaatctatttcagtaaattattcaaataactgccttctttttctattacatgtggaaacaggaccaaaagttatttggtgtcatataaaataaactacagtgtggctaaggcaacctgttattcctacttcacattctgaaggtggatgcaacaaacctattttgactaagtaatgctcagatcatttgttaatagtaatcagggaactgtaccaacaggtttcaccaggttactttgtttttatttttagctttttacagatgcagcataagctgtattttcctctttccagaatatgtttaaaaccatttctttaactcagtcaggtatagtgtaaaaaataaaggctttggtgtcactttagccataatgctgggcaagttattcaactgaaaataagtgtcctccactgtaaaataaggataggaatacttaatgtaggaaggttgatatcagatttaaatgggaagttcctgacacattgaaaatatttaataatttgtagttattattgttttccaggggtggggggagtggttggggttttttttgtttgtttgtttgtttctttgttttttagacagagtttcactccattgcctgggctgagtgcagtggcatgatctcagctcactgcaacctctacctccggtgttcaagctattcttatgtctcagcctcctgagtagctgggactacgggcatgcaccaccacgcccagctaatttttgtattttttgtagagacagcattttgttatgttggcaaggctggtcttgaactcctggcctcaagtgatcctcccaccttggcctcccaaagtgctgggattacaggtgtgagccactgtgcctggccagttttctagtttttattataattagttattgagtaattttataatgtttatatttttaatgtgttagacatagtactattaaacacaaaatcttatctcaagtattagacattagggtgtcttttttttttttttttttttttttttttaaagaccgggtctcactctatctcccagactggagtgcagtggcacaatcatagctcactgtaacttcaaacttcggggctcaagcagtcctcccacctgatgctacagatgcacaccaccataccctgttaattttttaaaaaaattttatggagatggggtctcactatgttgcccaagctgatctcaaacccctggcctcacgtcatcttcctgcctcagcatccaaactgctgggactacaggcatgagccactatgcccagcctattttttcttaattcagtaaacttatgtaaatttgacaattattcttttaacagacatttactgaggacgtagtaagtacactatttgtcattgttagacattgggaatataagatgaataacagagtctctgctctcaaaaagacttcttactggtgaatttaggagagacaaaggtatataaacaaggaagagcaaaggtactatgataatatgtaacctgggtgtcagctgagatctccctgggttttaacctctcggttaggattggtttgaacctccattccacctcatttgcaagtccaatgcccaacccaagtttttttcttatttctggggagctgatgttctcactgaaccgctttggctctgaacttccccttacggtaaactagtgaggttcatggatgagctgccatctgtccttattccacaaacatccactcagatgtggaacttatccctgttcctaggtttcacccaaaagcattttcacaaagctctgtgtgggcacagcagatttactaaggttgtgaaatgatgaaagggagttaacatcacaacatcacagaaacacaacttaaaagtactgtaaatttctattcttaaaagcaggccaggtgtggtggctcaaacctataatcccagcactttgggaggccaaggtgggtggatcgcttgaggtcaggtgttcaagaccagcctagtcaatatggtgaaaccccgtctgtactaaaaatacagaaatcagctgggcatggttgtgcatgcctgtaatcccagctactcagtagactgaagcaggagaatctcttgaagctgggaggtggaggttgtgttgagcgaagatcgcaccactgcactccagccttggtgaaaaagcactcctgccacaatatcgtgcttctccacagtgcccctttttcttctttctactcagtcctctgctcttcctcacccacaaattcttatttgtttttaatattaagtagttttttcttttcttagattccagcaggctccagtctttgagggcttactgcccacccagcagcttattagtgcttttttttttttttttgagacggagtttcactctttttgcccaggctggagtgcaatggaacaatctcggctcactgcaacctccgcctcccaggttcaagcgattctcttgcctcagcctccctagtagctgggattataggcatatgccaccacgcctggctaattttgtatttttagtagagatggggtttctccatattggtcaggctggtctcaaactgccgacctcaggtgatctgcccacctcggcctcccaaagtgctgggattacaagcatgagccactgcgcccgtcctattagtgcattttctcaaagaaattggagatcatttccttcaaaactatgctctgatataaattatcttacctccatatgtatagattgtagcagagacacaattagggagtagtcatttgaggccactaagtgttgactggagcagagaaagatgtcaaggaagataacttctctgaacctcagttgtcttcaaggtcttgtgatgaggattacatggaaatgtatgcaaagtgccttgcacatgataagctcttaataaatgttgggtttttttgtcattattgtcgttactgttgagaagatgacgcatcactcagccttgaagagtaaatgatggtttaacaaaatgaggaaggataatttaggcagagggagccgtattagcaaagtcagtgtgttggaggaaactgccagttgtccagcatgatgagatcatagggtatgagaaagaaagctagaaatttgacaggagccagatcaaataaagtcttgggcattaagtttgggctttatctaataaaagatggtgagccttggaataattttttttaatgcaatgacatagtttgctttttagttgacagtaatgtgtaagacaggttggaagggtgaaaaactggaaggagctaacagttcaggaagaggtgatacgggctagagttaagtcaatggagtaggaaacaatagaagatggcaggagaaatgctaaagaagtagaattttatataacttgggtactcgtaagacatgaggatagaagtaaggcaaagaaggaactcaagtatcattccaaggtttcttgacttactgagtggatggtagtaccatttatcaagacaaggcatactaaaatggcagttttggacatatgtttgaggtgactgtacaaaatctcagtggctatgacaagtagcaaactggaatattcaggcaaaatagtcaagatagaagctagaataaattatgtagttcaagagagtggctgcacatttaggtttaggaaccagaagcacacagcactcatcattccacacacataactcacatgcgacacacagccctgttcctagattcggcctagaaacattctcgcaagaatctgtgtgggcacagcggaagccaaaggagacaatgaaatgcccgagacagtgcataaaacaatgagaagtgagtcaaacatcaaatcctaaatatccacattcaatgcttctagttcccagatctaaatgtccacatactctcctgatctccagactgtattctagcttctatccgcaccattctgcctgaatattccagttgtgctactggttatagccactgggattttatacagttaccttaaacacagtcaatgggaggaggagaggaagagtcaacaaggaacgttgagagggtgcttagtggtgtcacagaaaccaggagagcagagtttcagagaggcatattaatgatgctaaaacgagaatcaggattaattggacttagccagttgaaggtaatcgttggcaaaacagcttcaatagagtggtaggaatagaagcttggttatagtgacttggaaagtcctataagttccttattcttcccaagaaattggcctgtgaaagagaaagagtagctggagaaatattcagggccatgatatagatgttcaagatcaaaagacttgaggttatttacaggctttcgagaagaagctggtaaggagggaaggtttgaacacttgggatagacgaaggctaatgacgaaatcactggatgcaaagatagaattagaccctagaaaagagcccagaaagtgagatgagtcttaaattagaaaagaggcagattggaaaaaagaaatgagaacttgaagcagaccatacctaatgatcccagttttttcagtaatgtatgaaagcaactattttgctgaaaaagtgaggatgacagggtaaatcctgtatgaggtgataaagttttgttgccacactatgaggaataggacagagataaccagaggcttgttaaattgcagctagcccagagcatacagcagtggctttaaaagtgtacttgcagcatctgcttctcgttagaaatgaatatttgggccccgccccaaacctgcagaatcagatactctggggggcggagttcagcaatctaacttaacaagttgtccaggtgattttgaagtaagttaatgtttgagaacaacttgcactagagcatctacagaatttgtgactcctccaactagcaagcaatgatgaagcacaaactatgttactcaaccacattctagtcatttttggtcatatttttcatattacaaatacatttatttggaacaatattgttaaggacttttaaaaatctactggtttctctctagaaatgggtgtcatacaggatttaaaaatctaaaccaagagatttctttcttccaagttttacaaagcaaatactataaaaaaaatcttgcttctctactctcattttacatttataatagagaaataataaaattgttgttcatagcatcagaaatattcagcgactccccctatatagcaattctcaaattatgctccagcactggtatcatctcattctaaccaaataatggcagtcatttcccaattcatggggaaggaatttatgaactgaatttctcaattttaaattatcctccaacaaatgtttcttaaaccttcggcttctactactacttgtcttgcagcaagtgctaattgatgaccaagtaagtgaacaaatagtaaataaatattaatgaaacttgaagttagccagtcatacttagttcaatagtttctcttcaatagaacacatgtttatgactgtgatttttatattgcataccaataataaagtcattttctactattattgtcccaataatcttgccattgctcaaatatttggaacctaacttggaactactttcacgatctgggagatatccttttggaaatcctgaacaatgaaacagccaacagatcactggtctagaaagatcataaagactcatttttcagctaaatatgtgtgtaggtgatcaaggtgatttaaccaagtatgtcttgcttaaagaaatatggcataatatgtagaaatccatatttgtaaatcatagatggacatatagatgacagtgagacattctccaattacttacaattaagactaagctctgaaagtttatttgtacaataagtaaataatggatcattgtagagatacagatccaagacagcaagccttaattataacctgattaaaatatgatataaataagaagagaggttagtcaggaagcacagaaagagcagaattagaacatattggcaggccgggcatggtggctcatgcctgtaatctggtactttgggaggctgaggtgggcagatcacttgaggccaggaattagagaccagcctggccagcatggtgaaaccacgtctctactaaaaatacaaaaattaggtatggtggtgcacacctgtaatcccagctgcttgggaggttgaggcacgagaatcacttgaacctgggagatggaggttgcagtgagccgagattgaaccagtgccctccagcctgggccacagaggaagactctgtctcaaaaaaaaaaaaaagttatttcacattccaattctgtggaggtaaatgaggaaaagaaataggtcaggctatgatggtcttagtattatttaaaaattcaaattatgtagataactctcattatcctgattctgttgtgaccaagcaaccttcagattctttggcttccatgaatagtatttggcttctcagtaatgtgataataatgtcaatgataatgtcaataactcagcattttgttttttatgctgggtctcttataagttgagtcagctctggaacagcaatatgttgtctggtgagggtcaagggggtcaaaccccaaacccgaactccactctaagaggttcaggccgtcttccttggcagtaccccaacctggaaacctgtttttcttctgaacaactacaggaaacagataaattatcatgtgctttttcacctcataaaaggatcgtttgctttatgaaaatgttttaaaacattgggaacttaaagaagatgagaaactgagaagtgacttttgagttttcagaagtgctttaatgttgacataactagtcttgatggtgtggtgagggtataaatgtgaacatattgaacagatcactcatttgagaaggttagcagttaaaagaaggaagggaacaaaatggaaggtgaaagtgtaattgggtaattgaaaagaattttggttgtcattttcccccatgagaaagaaactaggtcagaaaaaaaagagaaaggccaatggaaatggaaatagagatatgaacatcacaggagagaagctggataactgagaatacaggctccctaaaaagattgggtttgtggggcaagggagtacatttccttcagggaaaactccttcaaaattactctgaaacatagtacttcttttaaatacataactttattattatagattggctttagactctcttccctctgatcaaatctctctcaaattttatttatttacaaaatatgaatgaagcgtctctcacaattaaaagaggaagaaagatgtgatccctgtcctagagaagcttatagtctaaccggaaaaaatggacttctaaacaaatcattgcatgtcttgtataggtacaagattctatgtgatatggtttggatgtttatccacacgaaatttcattttgaaatgtgattcccaaagttggagctggggcctggttgaaggtgactagatcatgggggcagatccctcatgaatggcttggcaccatccccttggtaaaagtgagctcttgctgttagtttatatgagattctgttgtttaaaagagtctgagaccttccccttgctctcttgttcccactctcgccctgtgatgagcctgcacctgcttcacccttcatcatgattataagctttctgggcagatattggtactatgattacttgtacagcctgaagaaccatgaaccaattaaaccttttttctttataaattacccagcctcaggtatttctttacagcaatgctaaaatggcctaacacaatgtattagtctgtttccacactgctgtaaagaactgcctgagactgggtaatttataaaggaaagaggtttaattgactcacagttcagcatggctggggaggtttcaggaaacttacagtcatggtggaaagcgaaggtgaagcaaggcgccttcttcacaaggcagcaggaaagagaagtgccaagcaaaggggaaagagcccttataaaactcactatcacgagaacagcatggggaaaccgccccatgattcaattacctctacctggtctctcacttgacacttggggattatggggataaaaatcaagatgagatttgggtggggacacaaagcctaaatgtatcacacactatggaagcatagaggagattagttttgctttttaaatattcaaataatacttcaaaactatttaatccatttcattggtggctcatcttttcaccagtttccagtcctcatctgcaggctctcatatatgtagtcaggcctttatacttgtttccaatcagttaaacaaacatacattttccttgcttgtacagtataatagaactagaggctctggggaactcagaattacgtaatacataatacctgccttcaagaaatctgcacgccaattgaggtgtgcaagctaatagaacattttattttttactatttatatttaaatataggctgggcatattggctcatgcctgtaatcccagcactttgagaggccaaggcaggaggattgcttgaggctgggagtttgagaccagcctgggcaacattttgtgagactctgtctctacaaaaaaatatataaaaactagccaggtgtggtggcatccacctatattcctagctacttgggaagctgaggcaggaggaatgcatgagtccaggttacagtgagctgtgatcacaccactatactccagcctggacaacagagtgagattctgtccctaataaaataaaataaataaaaataaatacccttttacttcttaaagggaaaactaattaggctgtataatccgcataataattctgtgacatttcccagacagcaaagactttgggtggggagggtcagaagaaaaagaagggagaccaatacattgtaatgttaatttctaggtgtggaaattacctagaaaatgcctagatctattttttttttttttatatttatgctgtttggtgttctctgagcttcctagtctaaggtttagtgtctctcattcattttggaaaattctcagccatcattactgcaagtatttcttctgttgatttctttctttcttccccttctgttatttccattacaagtatgttaccctttagtaatcggcccacagttcttggacattctgttcagatttttttctttctactggcatatcttcaggctcacaggttctttgtccatgtcacatcttttgatgagcccatcaaaagcattctttatttctgttacagtgtttttgacttctagtatttccttttattgtttcctagggtttctatctgtttacattacccatttgctctcacatggcattctttttttctcaattagagttcttagcatattaattatagttattttagatttctagtctgataatttcaaaatctctgctatatctgagtctggttctgatgctttgtctattcagactgtactttttgcttctcaatatttcttgtaattttttgttgaaagtcaagtatggtgtattgggtaaaaggaactgaggtagataggccctcactgtgtggttttatgtttttctggctaggagttaagctgtgcttattgtttgctatagctgcggtgtcagtgtctaaaatgtactattaatgtgttcttgcattgtgtaaagtaagatttttttttttttcctggaaacggagtctcgctgcatagcccaggctggagtgcaatggccgatctcagctcactgcaacctctgcctcccaggttcaagagattctcctgcctcagcctcccgaatagctgggactgcaggcgcccgccaccaccccggctaatttttcgtatttttagtagagacgggatttcaccatgttagccaggatggtcttgatctcctgacctcgtgatctacccacctcggcctcccaaagtgctgggattacaggtgtgagccactgcacccagcccggtaaaggaagatttataaagaaaagaggtttaattggctcatagttctgcaggctatataagaagtgtagtgccagcatccctttctggtgagggcctcaggaagcttacaaccatggcagaaggtgaataggggagccagttcataacatggtgacagcaggagtagggttggggttgggtagggggtgccactttcttttttttttttttgagaccgagtctcactctgcccaggcgtgatctcggctcactgcaacctctgcttcccgggtcccggttcaagcaattctcctgcctcagcctcctgagtagctgggattagaggcgtgcaccaccatgcccagctaatttttgtatttttagtagagacgggatttcaccatgttgttcaggctggtcgtgatccgccctcctcgtgatccgccctccttggcccaaagtgctaggattacaggcgtgagccactgcgaccagctaccacactcttaaccagatctcacatgaactcagagtgagaacttactcattgtcatgaggaaagcaccaagccattcatgagggatccgcccccatgacccaaacactttccaccaaggccccacctctaacactgaggattatatttcaacatgaaatttggaggggacaagcatccaagccatatcaaatgtcctctagagtcctccttttagcctcgcctgttgtctttgggtttccctagagactcctttttaagtagggtctgaagcttacagatcttttagctgtgattctcagtgagtataaaggaccctaactgatgtggtggtaaagcacaggagcagaggaagtgttccataattttattattggctttcagtcttttagtgagcctggctccctgggctgtgaacttcacaagtgcttctcatcttctcctcctcccgacactgccatcaagttagataggaaggccagtaggggctggggttatgtatttctcttcctccatgtggaatgctggaggaggctggagttgggtattttacttcccccagctcagctaaacccgggtaaaatagtttgccttaagggcaggcgttggttaagcagaacaaagtgctctgagcatatttcaaatgattgctttcccctctttccacaggaagcttgagagcatttttccctgatctttatcctgagaacctagtgggactcctggaggtaaaactcaggaatgggtgtgtgtgggggggaggcaagactagggccccaggaattttattgttgctctttttaatatctcaagctagtccacaagcttagtctccagcgcttaatgaattaccctttaagtgtccctactaggcttcagccacacttctgttcctgacaatctgtgattgtctatattcagtctgtttctccagtgtttggggcagtggtttgtcctgtgacctccactctctgatggaactaagaagaatggttggttttcagtttgttcagctttttttcttgtgagagtggaactgacaacttccaagctctttacatgtcacattggaaactggaagtccacttcagtctcatacatagaaataattgatgactattagaatctgaacatctatcagctgaagtcacgctggtactcagtgatagaatgacatactgttttatgctcaaatctggttcttaaacctcctaggtgttaggttattttagttgaattactgaacccatatgagctcatatatcctcttctataaaatgagagtaatacaaattcttcctaaaacataagaagagagtaaaataagaacatataacaaaaaatttaggggaaaatgtgtgacaaaaatttagcaaaagaggaggcaatttctatggttctttaccttacattataaactataaaagtaagcatttcaaatgagtcatacactatttaacccaagacttttttgagacagggtcttgttctgttgcccaggctggagtgaagtggcaccatcttgatcttggctcactgcaacctccacttcctggattcaagcaatcatgcctcagcctcccaaatagctgggattacaggcatgtgacacgacacccagctaatttttttgtatttttagtagagacggatttcaccatgttggccaggctggtctcaaactcctggcctcaagtgatccactggcctcggcctcccaaagtgctgggattataggcatgagttactgcaccagccttaacccaaaacattttcaacccactatattaattagtaaaagattatgaaaagatttcttaattgggtaattgctttagaataaagacagtttcaatctgaagtgacatcacctagtgacaagcaattataaagctttagtataaaaaactctcctaatagataccataatatgcatctgtcaaaataagcattttataaaatggaaatagattccatactaattctcagatattacataaaagcctgagaattttagtcatataataatattttataattttaaaacaatcattgaggtataattacatatcatatttacatatcatgaaattgttgtataattcaatggctttagtacatttaccgagatgtgtaaccatcaccataatccagttttagaaggtttgcatcatcctaaaaggattgttaattcccatttcatttatgctcccatgccagccctagacaaccactagtctactttctagagttcagtggcaccattatagctcactgcattcttgaattcctggacccaaaccgtcctcctgcctcagcctcccaaatagctgggactacaggcatgtggtaccatgcccagctaatttttaaatttattgtagagacagggtctcgctatgttgttcagcctgctctcaaattcctgggctccagcgatcctcttgccttgatctcccaaagtgctgggattacaggtgtaaaccactgtacccatcccactaatcttctttctgactttggacatttcatataaatagaattatataatatgtggccatttgtgactggtgtctttcacttaccacagtgttttcaaccttcatccattttgtaacatgtatcagtattttattcctttatatcactgaataacaatatccattgaacagatacagtatattttatttatccattcaccagttgatggacatttggatcatttccactttttggctattatgaataatgctgctataaaaaatgcttatacatactttgtccaaatttttgtgtagatatgtgtatagtatatatatgtagtatatatgtttttatttctcttggggataaacctaagagtagaatttctgggtcatatggtaaatttatatttaaaacttttttttttttttgagactgagtctcgctctgtcgcccaggctggagtgcagtggcgcgatcgcagctcactgcaagctctgcctccagggttcatgccattctcctgcctcagcctcccaagtagctgggactacaggggcccaccaccacgtccggctaattttttctacttttttttttagtagagatggggtttcaacgtcttagccaggatggtctcgatctcgtgaccttgtgatctgcccacctccgcctcccaaagtgctgggattacaggcgtgagcaaccatgcccggcatatatttcaaacttttaaaaagatccaactgttttccaaagtagcagtttggaaatggtaccatttaccattctcaccaataatatttgagagtttctgtgtcacagcatccttgctaacatttgttattgtctgtctgattatagccatcccagtgggtgtgaaatcgtgtctcataatgttttaatttgctttcccctaatgactagtgatgccagattcatgatacttattagtatttcaaaaatggtatattagccatttttacactttctttggcaaaatgtctattcaaatcttttgctagtcacgtaatattttaagggaccaaaattaaagaattactgataaattattttgattgaatttgatattttatgcaagaatcatgcatatatacttaatatagttggtgcaattaatcatttttaaacttataacattaaatataaacaacacaatggaataacaatattgacctattgaggtcttcgaggcagggaggatcttatctcattttagtgttccctgcgtgtgacattgaacctagcattgtgcctagaacattttgagtgttcagtggatgatttacactcagttttggatatccagtctgtgtgaaattattttctccttaggactttgccagtggttttgttgggctgcctctttggctctgggacacatggacatagaatatagcagttaagggtgtaagctatagattcagattgccttggcttcactgctttcagtgtgcacttaggaaagttacttagcctgtttattaggccccgggttcctcacctattaactgtacttgctgcctagagttgtagtgggaggtagatgagacgatccatgcagagctcttcacacactgcctgatcacaataagtgctcagtaagcatgagctattatcattgaagttgttaagagtctgaacagtgagacttcagctttaagtctgattaacaaagaggcagtttagctgcattttctcccctcaatttttccttaaaatatttatatatataggctttcttttgaaaccaatatatataacattacaaatgttcaaaagatatgtgaagattttaaagaaattggcaagtacatacaatatggtaacttcattactaatccttcaattttaacaagtatttcttgaccacaatctggcatcattcatcccctgacttatgtagaacatttttttctgactcaccttagatctttatcttgaagtcagtcagtccttcaaaagagctcctttaaccttcatgctagtttgtcatctagagttccaacttagggctttcctccttataacattaatagctatcttttaataagtgccatgtggcatgtgctctaatacaactcatctctaattatcacaacaatctaagaaagtaggtattattggtcccattttagacatgaggacgttgagacacactgtggctatgtaattttcccaagtcacacacctggtaaatgaaaagcctatatttaatataatatctatgtaactcttgagggctgtattctcttgcagaaaagatgtttgaagcttttgtttacaaaagcaagctgtaaataaatttctagttagggataaaaaaatcattgagctacctgtaacagtgagtttgagttgctgggactcaattagaaaaattagtgatattattcacataagtttctctcctcttccctcccatttttctactcccctgaccccagtttgtttcctcctctcttcatctgtatttctactaatgaatagtgtcaagatggaagcagaaattgaggaagatcagcattggaggcagagagaattgcccatctcccaaagtggcttctttttctcttccccctttcccttttttgtcttcctgtttctctcttctttctcatttctttcttttctttccttttttttttttttttttttttttttttgagatggagtctcgctctgtcacccaggctggagtgtagtggcacgatcttggctcactgcaacctccacctcctgagttcaagcgattctcctgcctcagcctactgagtagctgagattacaggcgtgcaccaccacgcccagctaatttttgtatttttagtagagacggggtttcaccatgttggtcagggtagtcttgaactcctgacctcatgatctgcccaccttggcctcccaaagtgctgggattacaggcgtgagccaccttctctctcatttctatctctccctgtttctttctttcactctccaaagaaagaaagaaagaagagagggaggtagggaggcaagtggggaaagagagaaaggaagagaggaaaggaaggaaggagggagggagggaggaaaggagggaaggaaggaaggagggagggaagtaaggaaggaaggaaggaaggaaggaaagaaggagggagggagattgaatataatacattcttatttttaaaatgcctccagccatattgtttgcactgtaccttgaaattcattttctttagaaagatgaattcattttctttagaaaggaaggaaggaaggaaagaaaggagggagggagggaagaaaggaaggaaagaaggagggagggagggaaggaaagaaggaaaggagggagggaaggaaggaaagaaggagggagggaaggaaggaaggaaaaaaggaaggaaggaaaggaggagggagggaaggaaggagggagggagggaaggaaggaaagaaggaaggaaggaaagaaggagggaatgagggaaggaaggaaggaaggagggaatgagggaaggaaggaaggaaggaaggaggggagacagagggaggaagggaaattagagaggcgtgagggaaggtggagaaaagagaggagaaccattggcagtggctggatcctttatgacaagttcgggttttctttcctgtctaacttcttccttcctttcctgcctttttcccaccacaaatattgcctctagtgatagaacacctctagttccagtaaatggtaactgagaaacgaagtggtaatttacttgtcaactggtatttgcctgttccttaaatgatctagataaatgggcttaaatccctattcacaccttgtgcaaaatctgatgccctccccaagacttctccaaattcctgaaagtttacagtcttgtgatcacctctagttctaattccctgactccaataaatttgggttcttcccattgtcttatgtatttttttatttcagtctctctgcatctatttacacttagaacccagccgttttccttgatttctattattgaaagacaccatcttcacaaagactctctgtgtggtgagctttaccgaaggtaaagagaaatgaagaattacagtgctgcaaaacaaacaacgtaaattgaatataatacgttcctatttttaaaatgcctccagccatattgtttgcactgtaccttgaaattcattttctttaggaagatgagttgctgagtagatagaggtggatagatgtacagatgtatgataaagcaagtataataaaatattaatgtagaatctaggtggtaagtatatgagtgtttgctgtttaaaaacaactttcagctttgctatttattggaaatttttcgtaataagatattgagaaaaacaaacaacaaaacaaaaaaatttcttcagcatttctgtcaagtcgttcagccatccatcctaccctctctcttaaattctggattatcttccagtgggtaaaccctgccaaaatttctgttcatttctaatggaaagcattttatcattctttgttatcttctactaaccacaatctcattgcattctcacccaagctgcttatgatctcctcctaaacaaagacttccttaagaattctttaagaacaataacatcttacacatatttatatactctttaatccatttaacaatgccttgttcataggagatacaaatatacatgtgaggctatattgtacagtagaattaaggaggagatatgaagccaaaagaagttggtttaagtcctggctctgtcactaactctgactttgaactagttgtataacttctttgagtccatttctaagtcttctaatccaaaaaagaggtatgatttttaaacaatgcgtacctcacagggctgccatgagaattaaattggataatgcaggctttcaaaactgcaaccagtaattgaataattggataatgaacagaaggcaaagattgtttatgtgattggactgtgtgactgactgttggggcccctgcctttctggctaatgaacaacaggcatacaaatgccagtacatcttcctaatgtagacgttcaacctcttccaatggcctctcttctcctaccccagctgcagccttagtggcagttcagatggttctagaactgatactttctgtggtgctcatttggcacaaacaaaactcatgtatccttgtcaaccactcagtggtaatgttgagacccaaactctctttgtcttcagctttcgctcctagtgtcttgggttctagagttactactaggatatcaggaaacgtcccattcgacatcgtattatactgtgagtaatggattagataattcaaggaaagtgttggttaattatgctcttagatgcataatggtatttcactgtgaatattcatctatctctccacaaattttctttgtccatgtttgtttgccacttcactttctaaaaataatttaagtatttcttacctcttttaacttatctacttctttagctgaagctagtataaatgggaattttaaaacaatgattcccttagcaactggcaaattttgcaaatttcctcatgctgttcagagttgcaaaaatcatataccataagtagcattatgaaagattaattaatatcaggatgtcttccaaagcaagccatttgaaataccattaaaacagaagaatacaaattattttaaagagccctgaaatgttttcatccaaattgggtaaatacatattaattttatttatctctcaacaaatattttaggaatttttatagagcttcctataacatgccaaaagataataatcagttatataaagcattaacaaaattttggctatgataatcaatacttaaatatcagctgggcacggtggctcacacctgtaatcccagcactttgggaggctgaggcaggaggattgcttgaggccgggagttcaagaccggcctgagctacatagagagcctctgtttctacaaaaaataaaacaaaaaaattagccgggcatggtgacatgctcctgtggtcccagcaactttggaggctgaggtaggaggattgtttgaacctgagaaatcaaggctacagtgagccattcatcatgccactacattccagcctgagctacagagcaagactctgtctcaacagctcccactcccctatcccgcaaacaaacacactgaaatatctatttaatagtccctttttggaaaaacataaaagtatattttaaaaaaataactttatcacatatatagcaaaaacattttggcagatctatgaggtttaaaaaagtaatccatactcaatggacatttttcttcttaaggttataaaacacaaggatatgattacaacaaccttataataaagatccaagttcattacattaagtttgttattgacacaaaaaataggatttaaggatttattttatttatctttagcagttggccatgggtttaaggtctcttcttccatacttaattgtttgagtttctttttttttttttttttttttgagacggagttttgctcttgttgcccaggctggagtgcagtggtgcgatctcggctcactgcaaactccgcctcccaggttcaagcaattctcctgcctcagcctcccaagtagctgggattacaggcatgagccaccatgcccagctaattttgtatttttagtagagaccgggtttctccatgttggtcaggctggtctcgaactcctgacttcaggtgatccgcccgcctcagcatctcaaagtgctgggattacaggcgtgagccactgcgcctggcctgactttccttttaattaacatagatgtgtttaatctagctgaccaatgctgtagatgtagtctattcaaggaactagaccacctctgccacttttgatcatatcttcatttacttgtattctaactagtctttattgaatgcccattatgtgtgagtcactgttccaggtaccagggattcaatagtaaacaaaaaaaacaagctctcatggagctgacattctaacctatgtgtgacttgggggaagagggaagacagaatataaacaaacaaacatgtaattatatatcaaatggtaaactatcagagaaatggagaaaaacaaagcaggggaagaatagggagccagtttgggctggatggtgtggggagagaaaatcgctatctcccatacctgatctggggaaactcactgaggtgacatttaaaaagatgagggagtaggccgggcgcagtggctcatgcctgtaatcccatcactttgggaggccaaggtgggtggatcacctgaggtcagaagttcgagaccaccctgaccaatatggtgaaaccgtacctctactaaaaatacaaaaattagccgggtgcggtggcgtgtgcctgtagtcccagttactagggaggctgagacaggtgaattgcttggaaccaggtggcagaggttgcagtgagctgagattgtgccactgcactccagcctggatgacagagcaagactctgtctcaaaaaaaaaaaaaaagaaaaagaaaaaagaaaaaaaaaaggaaaaaaaagaaaaaagaaaaaaaagtattctaggcataagaatctgcaagtgcaaaggacccaccttcttgaaactctctcctgctctaggatgtctccattccccatggccctgcctcttcactacttcctcctctgtgttcttcaatggtgcttcttctcctccccatttattgaaacggccaatgtgaaaacagctttctgcacctttccctttaacaacccatccattctttttgatagtgttgttgttgattaacatgtattaatcgattctttaaaatatctatgcaattgaacaaaatttacagttctcaaggtgcctgtctgcagcatattagacatcaacagacagacctgattattactaggaaatagaccagaggccaaacttcacaatttaccaaaaaagtatattagattttattttagccagaggaagagtctcaacattgcagaatcagaacatcccatttttaaagattagatttcaatgctcccttcatgaatgtatttctggaaaggcagtgatatagccatacggtcagataggctatgagttataactatacgaaccagcaaacttggaaaatatttcaaaatgtcatctgattaaccctcttgccttttggcagatcattgttgaaacttatcccggttgctggaaaatttttcattgagaggagttctacagtttctcttcacagtctgctttgatgaaagcattaactcatgtaaataaccctttttgttcatgttcttaccagtatttagaatgttttccttttcatccatgcaaattctgcaatgatttaataacttgttaattctccataaaatcttatttgcccatagaggacactgcaatttttccacctgtaagccaatatctacaacatttatctggcaattaagtgtgaactattattcctcttataaagttacatacatatgtattatttaatacttccggcagcaaatatcatctcttcatttagaccatcactaccataagggcaagagttggagctaaacaattttgtgccttgacagagtgcttcttgtatacaatcataatttgataaatctttgttcagtagtgcactacagctagctcatatcagctactaaagccagttgtgcacatctccttccaacccattgtttggtgacatcatgctggtagcttaaaaatcaactatggtaggctgggcgcagtggcttatgcctgtaatcccagcactttgggaggccgaggcagggggatcacctgaggtcaggagttcaagaccagcctggccaatatggtgaaaccccgtctctactgaaaatacaaaaattagccgggcggtggtgggcgcctgtaatctcagctacttgggaggctaaggcaggagaatcacttgaacccaggaggcagaggttgcagtgagctgagactgtgccactgcactccagcctggccaacagaagtgaaaatccgtctcaaaaaaaaaaatcaactatgatgggaatatttagaccatagaaattggcaagtgctatagatcggtagaatgggttcacatctagcattacgatttactacttgtgtgacatttgatgagataccaccctgtgcctctcactttcttcatctgaaaatagggatattatattacctatttcatacagttgttgtcaggagaataagagtttatatatgtaaaccacttagaaaattcgttggtacataatatatattcaacaactgttagcttaatttttattaaacaatctctctacctatttcacaaattctcgactgctctgtaaacattttgaggaagtctatgatatgatcataatctatgcagcattattttccacgactccccagtaaacaccctctgttgtctcaacagactcctcttcacctacccctatgataagggaacttaaccatagcataggaatccctctgtctggacgactacagtagaaattatcatggggaggctggaactaaagtagtaagtggtgtgttctggtatcctgacttctcaggtaaaggttgggcccattttttgtagaatcaatggaagaataagactcttagcattatatttaatattctttttatagttgtttttggaagagtctctcactctgtcacccaggctggggtgcaatggtacaatcttggctcactgcaacctctgcctcccaggttcaagcgattcttgtgcctcagcctcccaagtagctgggactacaggcacgcctggctaatttttgtattttttggtagagatggggttttgccatgttggccaggttggtctcaaattcctggcctcaagtgatccgcccgccttggccccccaaagtgctggggttagcattacatttagttttattgcatgttaaataggctttccagggccagataagaatttgaccaatttttatattattttgtgggaaaggatgtatttgttcccaatccccgaaaatactaaaaataatgacatgaattttccaaaccaatctccagcccaacccagtactaggaaatatatgtgctttaatgtcatagactttgatattcagaaccatagagcttttaaaaattgctttattaaatactgagtagtatcaaaatataatattgttgggtataaaaaatagcaatacaatgaatacttgtgtagctaccaccccacttataaaataaaacattatccttacctgtaaaaccctgatctgatctctgaaccaattcagaggtaaacacaatcttgaatttgggggttataattccctcaagttttatttactattaatattttttgagatggggtctcactctggagtgcagtagtgcaatctctgctcactgcaacctccgcctcccgggctcaagcgatcctcccacctcagcttcccaagtagctggcaccacaggcatgtaccaccaggctggtctcgaactcctgagctcaggtgatccacctgcctcggtctcccaaactgctgggatgcagagatgagccactactagcagcctcagatatatgtaatgcaggggaaataccacagtgatgtgagacaccttcatccattaaaaaaatacatgaacaagatcctcctcagtcagaaattttacattgtttatttttatcccactcttattcttcttccacaaaatcatttttattgttgtttttgagatagggtccccctctgtccaccaggctggagtgcagtagtgtggtcatagctcgctgcaacctcttaagtcctggcctcaagaaattctcctatctcagcctccccactagctgggactacaggaacatgccaaccaagcccagctaatttttttttttgactttttgtagagacagaggtctcgctatgttgcccaggctggtcttgaactcctggcctcaagcgattctcctgccatggcctcccaaaatactgggattataggcatgagccactgtgtccagcccaaaataatattttaatggtgtattttttttttgctttagagtctcaattagtcatgcttcactattttttcagcagaaaaataagtacataaattgaaattgcaagtaagtagttaagcatcctaagtccatgagtttataactgttaaaataattcttctggtttgagttattataatattattattaccatggtatagaattgatgaaagaacataactacattatactttttataaacaattattaaacatgaaagttaactgtttttttggaaatacatctcttaaggatttgaaagaagtggtgcttttggtgccttgattaatggaggctctgtgtggaggccaggagatttttatttttattttttatttttttttgagacagagtctcgctctgtcgcccaggctggagtgtagtggcatggaggccaggagatttttttatgcccaaaggcaatgcataacagtaagggaaggtggcctacttttgcaaagtaggaaaagggaaatatgaagggagaaaatgggaactatgggcaagttcctaggcatatcacttttaggaaggagtatatatgactttgaggatttgggaattgattctcttaaacctgtgtctgtggaaaattttcaggtcttgcaggagtacctgtacatcttgtggaaaactaccttgatgcaatgcagcccctaagaacactaaagcaagctatcctaaaagtcactgaatcaaatgtctttcagactaaaataagatgcctgtgtcatgtaatttagtgaattaattgaaaacagaaggataagcaaggggagaggaatggtgtaggttaacctacacctaggctagggtcaagcagaatggaaggactgcagtatttgagttcatacatcttgtctcttcctcctgtgtatcaaccttcccctgatggtgtggttacaagacagagtcaaggtttgagcaacaggacttggcagaaggatggtgcctcaagtgaacacactggctttagtttagacctggccacagctgtagcttgccaattacactgatgaacagctatggagcttactgggtaaaggacacatgggctagaatgggttttgtaaatgagaagtcagtttaagaccttatgaatattgagtgcctgatatatgtttactgtatgaatatttggtgctcttggtcctactattcctcccaactgaaattaagcacacatatgctcaacttcttttatgtctaacatatctcacaagccactagcttttatatttagtttcattcattttccttatttttctcatttttcatagcatactgaatattcttaaataaaacagcaaatattcattgcacctggttggaagaacaccaccaatattggaatggagacttgtctcttccttttgaactcccttccaggaacagagcaacaggatcacatgtaaactatatatcttctctgcacatcctaaaagagtgggtagactgaaagatgggaagtacactgggaagcctttttaactaactcactataaaaccttccattcaggacaagtgcaagatattgatctcctgagcccttaggatacccacatgggctaaggtggctggagctgtactcttttgcctccaaacacaagcttctcatttctttattccagtatgacatacaacgtattataattttctatgtatatctagggtagatacttaggtacggaattgctaagtcatacagcatatgcagtttcaaccttaatgccaaactattatttcgaggttttttccccaatttatattcccaacaagatgtaagaaagttcccattgagccacagcctaatcaatatttgataatttcagaaagaataataacacttaataatatgaaaatttcctattttaaaaggatagaaaattcaggtctaaagataatttaataggtttatttattcagtgattcattttaacaagcattgattgacacttatttcactcttggcattatgctaaatgctgaggataaaagatgactaagactaatccctgttctcaaggaacttacactctatatggaatgcatatatgtcaacagattattcaggtgatgagtgcaataatggaggtaaatgcaaatttctgtagcactgatgaaggaaagagaaaaatgagtctgagtttggggcaagagatatcaggaaatgtgtaggttgaggtttttcacaagatatatttgttttcaaatttgggttttactttttaaactctatactcatagttctgtagtgataacttgggaaggccaggacatgaaggggttttgtatgatagatgatatggaaccacttaaagagttttaggcaatgcaacaaaatgaacgaaattgtattctaaaaagggaatgccgatggcaatgtggaggatagactgggattgagatgggcatgaatggaggcagggagacacgttaggagtccattgtagttgaagttcaagatgataaaagcctgaacctaaagcagtgacaatggatatggaaagaaaatagatatgaataatattcaagaagtagcattaatagaatcaggtgataaactagaagtagaaaataatgggaaaagattagtctatcatgatacctaagtttctacctaaggggatatattcattcattcattcatcaactaatatatattgatcacatgctacatgccagaacttatgctgactgtgggggctatctagggataacatgttaacatggctccaggggacactattcacgtggtatatacatggaatatggtagggatggtgtttccagacttcttcaatcgtgtggttccagattttctgtggataggacatagttcctacggttaaggagcacacagttctgtgtacagttgtactgttaaccaagacggaaaaaaaataaggactgtgcaccgagccttgggaacctacatgttgccccttgtctttcttttcacctgaaacaattagtttggcatattggacatgctgaccttgaagggtttatggaatgtttagatggaaatttctatgaaaccactggacatgttagtctagagcccttggttaagggtttatagtgagttagttaaaaaggcttcccagtgcacttcccacttttcagtctacccaatcttttaggatgtgcagagaagaagtgtagtttacatgtggtcctgttgctctgttcctggaagggagttcaaagggaagagaccaagtctccactccaatataaaccttctgaaagtttttttctttcaatggctccaaattgcacactctacaattgagaagttcagaaaattgagtaactcatattaaaattttcaagaccgcaaaggtttttcacataatagaacaattttaagggtgaagtaaatgaattcaaactaatttatttttcttttcatatatgtctaataaaaatgactgacggattgtttggactttaacgtgtttagatgtgagtctccccccttttattcagtgacaagtgcaaagcaacttgccaacaatttttttttcaattttgtaattttaacactgacaataagaaacattctatagaaagtttgactttgaactggaatatttttgccatatctctgcctagagggaatttttatggttgagtttgtaaatgctagcaaaacaaagttgaaaatggaaaagctttcaattttcaaggctaatgtaagatgagttatgcttcttatgcatcatacttctggtaattctcttattttttatttgttgcagtgtaaattttatcagagaagcctttgaaaaaaagatatttatttttgtatgaaccaataccatcagcatcagagaagccataatttaattatgaaggactatatattataataagttataacacttcaaccagttttcatgtttgtagttatgggcacactataataatttccttcagtaagggtaaacaccagtgaagcaagttaaaaacagaataaataaaaaaactatattcaatgaaactactagatgcaacccacatttccagtaatcctggagaatagtaagcattaagcttaagatctggaacatctcattcagtgtgctttactgtaggatatcttacttgaaaataataagaataatgtcactcaatagcattttagacttgttgattatctatgtacatataaatctggtctaaatgttgaggtaaaaatccgaattaaaacttgctgaggctgggcacaatggctcacacctgaaatcccagcactttgagaggccaaggccagaaaatcgcttgaggccaggaatttgagactagcctgggctacatgcccagtatctataaaaaatacaaaaaaaaaaaaaaaaaaattagccgggcatggtagctcatgcctgtagttccagctactcgggaggctgaggtaggaggattacctgagactgacagtttgaggctacagtgagctatgatcacaccggtacactccagcctgggtgacagagagagaccctgtctcaaaaaataaaaaataaaaaacaaaaccccccaaaaaaaagaagacttgctaagattcttttgtacgtatgagaagtaaactaagggttttgattttgaggcatgtgaaaaatccctacttcaaaaagccagagaatcagtatatcatggttaagactcaaacctagtcatcaaaaactgtagaaagaggtttcacttaggaaacagaaataaatatattctctgggcaaagatgtgaattcagagaaaaataactgcattgacaaaggaaagaatactggccaaataacctttttttaaaaaaacagtttttttcctacttttttttttttactctggtaaaagtttaccttcatagtggcactggtgggaactgccccttttattgttatttatttacttatttctgagacggagtctcgctctgtcatccaggctgtagtgcagtggcacaatctcggcttactgcaacctccgcctccaagattcaagtgattctcctgcctcagcctccctgagtagctgggactacaggtgtgtgccaccacactcggctgatttttgtattttattttaggtagaggcggggtttcaccatgttggccaggctggtttcaaactcctggcctcaagtgatcagcccaccttggcctcccaaagtgctgggattacaggcgtgagccactaggcctggcgggaactgcctcttttaaactcttgtaaagatttgataatggaatctattttatttactaaaggagaatctaattaatttaacatcaaagatacacttatgggaatgaaagaaaataagccccaagtgtaatgtgtttgcaatgtatttaaataaaatcaaagacaattctaaaacagacggaaacaacaaaacaggaatgtctacttctttaaaattacatagtaataagcagataatccatatttttgttgttaaagagtgataaccaggtaagcacaggacacacacacacaatcacccttacatagtgaaggtcaaaattctgttatatctgctatcaatacttcaagtagatacagaaagttaaaagatacattctttttttttttttttttttttttttttgagacagcctgttgcccaggctggagtgcagtggagtgatcttggctcactgcaacatttgcctcctgggttcaagtgattctcctgcctcagcctcctgagtagctgggattacaggtacacgctaccacacctggctaatttttgtatttttagtagagatgggttttcatcatgttggtcaggctggtcttgaacttctgaccttgtgatccgccagccttggcctcccaaagtactgggattacaggcatgagccaccagagcttggcctaaaagatacattcttttgtggaagaatatgcagtgattgcaatttgtacttatatttaataacatattaaaaaaataaagatgctcgtaatgaagcaaggaagcctgaaatcactcggtaagttctcaatacccacagacctagggctgggccaggatgagatgaaatgatggaggccctagctagccttaggggcaaaacttaagggagttccaaacaaaccctagtattcaagatatgattttaatggaatattctgaaaaatgaaattgaataccaataaatacatgataaacaaaatatcaaagtattaaataatgaggggatccactcccacacctgcataactcttctgcttcatcttaatgaggactcaagaggagtgaagagtcatgcccagagaaactttcattcaactctcctttttagatgaaggaaggtaatgggctgtaatagcgaggaaaagaccaagattgtggcttctagaagcaacatgaatattctccctcttgtaaatgtgcacaaaagtgggaatcatggtaccaaggccctctttggcttggctgcttgtagccaagccaacttcacttctccactatattacaatattcccttctagacagaacggtccctttaatgttccaacacatttttttcccactttgatttagctcagtattttctaaaaatacttcaaagacctttaaattcctttagaagcaataattaaataagtttgtaaatgctgtatttacaaacttgtaagtccgtctagtggagattcaaaatgcatgtagcatattaaaatctgggataaaattgacaatatgaagtctgtttatcttgtttaatacagcgttttcccaattttattttatcatagagtcacagcactacccagtctctgacttcaactgcaataaggcagcaatcgtctagccctgctccctttctttccttggtggtagtagcattttgcttttctgattctgtaaggtatctctccaccttcccagatcctggcttttttttttttttttttttttttttttttatcagatctagtgataaggcagctctggaatttttgcccaggattttgtttatgtgtattttagtttcagtatggacataagatcatgggatttcatggaagatgtcaggacgactgtgggaagaaacactgaccaattttagcctgtgctttaaaatagccatatctatactctctgtctacatcttcttctctttaaaatatatgtcctctaattataggcttataattaggaagagataaatcatttaatagatgtgatatggtgttggaaatcctcatcttataattaccccagtggagtgatccaaaatggaaaccactatgaataggcatgtcttggggatcagaaaatggaaaccttagcatatcagtctaagtccaatgaggacagagaaaccatatagtaatttgaataagaaaagtttaatgtgaagaattattgactataacagaggattggagaaacaaggaattggctaggaagaactaaaaataactctaaagaatacaggaataacagcatccactaccctcagggctgaaatacagcaacaaagtaagagtcctcccctcttctcaaccaaggctgaatccagaccctgcacagccttggctccctgggtggcagagaagttgtgctagtagagcttgctgcagatctgctctctagggtgctggggaaggctgttcacacggagttgcctcaccagagccacactgctacaaacagcccaggaggggagggtgctgggggaaacttctggctaccggtgcttcaggagcctggcactggaaaagctagctttattgcagcagctgggctttggagaagatgtgggtatgtatgcacttcaggagccaggagctgggaaatctatatgtcctgcactgcagaaactgctgtgtgagcacaagttaaccaggaagcaaaaccctttcctcctgcaatgtctttctaacgtccccaccgacaaaacatgattgccaactgataaagagaaatatttaatggatccggattcattttcacagagcaggtaaaaaaaggtgaatttggagctgcaagacaataaactgataactggcacacctagggaagaaaaatgatctggaagaaatattgtcactaataggaatatgagtcaggaaaagatcctgccaataacgaagataattcaggagaatcatctaatgtcagaaaagatgagtcattgcttttagaaattgattatgactagatgggaagaagaaattgttttctctgagaaaagtctagtttagaaaagcatggggaaaaacactgagagaacggtttctgagtatgaaatccagaatagcaaaaaacttagaatggtgacttataataactggcatcccctaggattgcagctaatagaaccaagttgaactcttactattctatttttttctgttctattttttcttactttgctagtttgtaattcaaatttctcacactgtgcaaatgttgatatttttagtactttactagatgaactgagagtattatgatttacatttttcactttgatggcagggtgtagggaggggacaaataattgaagtcactgccctaatgcctaaagtgaaactttggaaccttgggcagtgagattagaataggatagcaccttccttggtgacttaaaggcaatatgtgagcagctgggtaaagaatggctgaattactacaggaaatctttaattttagggtgttcttagaagtttcatcacagacctctgtaaacttttatatataacattccactgctgctcaaagatcactgctactgccataggacaattgccaacaccaaaataccagaaggctgatttgagaaaattagttttctctgactcctgggtaatgaattaggctctttttagaaattacattggtttcttaaggtaactagggtgtcgtttagtaagttggtattttagtcaaacaaaatatatacctctttagtcagtaccatgcctgaagagtaattacacagatgctccatgaatgtggttctgaaaggtcatatggcaagtgtcagcctttttatgacaacactgtactctcttgtaagtgcctgaatatggcccttgggaatgctaactaaaacaacaaggaaaggtttatgatgctaagtcctccactacaaacatttcatctcttgttacagccatgcaaattattataggtccattgacaatgggaaaaatttactgagcttaaaacaaatcagacagtatttaacggtataaaaagttaaaatggaaaaaatatgtcaaaaagctttgggatcacttaagttactaagctaactgtctgaaaactgtatataggtcttacgaatatattgtatactagaaaattattggtaagctcattgagtttcttgtgtaatcatgtgcaacacagttggaataaacctactaaaaccttacctattttttatgttcagactacatgagagtttcttcactcttcttcatctatgcagttaatgtgttcccactatattttaaggacaatggaaaatgctgacatatggagatgtgtaagaaaattgttcttaaggagcctgtgaaaatgtactcgctcctcattcttttctttctgttttggcacctccaaaattattaagtgaaaaatattaatctaattaacaatttatgcagaaaagaataagttaaatgttacgttgttcacttttagagaactaatctgaaccacatgcacacccattccagtatctttataaaatatctactcttttctgctatctcactcctccatggtcttgcatccctttcactttagggcaagggttggcaaacttttctgtaaaaagtcagtagatattttaggccttgtgactcgtacagtgtcacaactacccaattcttctgctttaggtgaaggcagctatagataatacacaaatgactgaccataggtatattccaataaagctttatttgtagacactgaaatttgcattgcatatcattttcatgtactatgaatattattcttttaatttttcaactatttaaaaatgcaaaaaacatctttgagaattgtacaaaaacaggcattaggccaaatttgtcccatgggccatagtatgacgactcctggtctagtggcaatgctgcttcttcaagggctgagtaaccttctgtcaatcagagtccaaacgaaaattctccaaagatcgttctgtttataaagttttcccatatgagacattcaaagctttagggatcatcaatgtgcccataattttccattggttttcccactttaatagctggtccattgaaaaatattttaagattttacagggacttattctacttttcatcataagtatatataaaataatgtatgggggttagaaaaggaaaccaggataaaaggcctatgggttctgttcccagtcagttctttgactggataaataacctgactgcttcacatctcattttctttgtctagaaagtcagaattgtcaggtgttgttactaaacagttatgttaaatgttaaaggacatggtagggagtggtgggtgggattatgtttgtatcttccagagttgccacattttcagaaaaaaagtgtatactttttagtgccatcacatacaactgaaaagatgaatatttctgaagagaaatagggtgggtgatttgtttcaaacattttgacgtagaaaatctaaacccaaagatgacatcaagcaaactatagcacaaaatacacatatgtaaaacctcatggttttcctatgtgcctacgattaacaggagaggtttggtttaggggtctgtaaaaatgttttctttctttaagcataatgctcagagccaagacatcatcagctccaggctcagtcagttccagtcgaaagtgtgaatgttcagcaaaaggatgtttttgaaaggagactgaaaacccactgtgccagatacctgaaacgttgttagggtattcagtggaaaatttcatttccacattataaataactgtaggatattttaagagatccaagactagtaacttccaagagctgcttatattagttccactgaaatgtgaaatggaggaaggatactgagaaaggccataaagctgagttactagatatgattaattaaaataaataatctcactattgattaaattgcccttaaaatccccaaccactgaggactgcatagtttgctatccaccaaataaaacaaaggacaaaacagcgatggagaaaaaaggaggaaaagtccccaaggtaacttcttaaattcaattctagaattttttatttggaaagcccctctggtggtccatatttgaaatattaattgtttcttattgtcttcaaagttccaggaattctctgttctatggacttcctgggaggaggacaatcccagagaaggtggcatatcacccaccatggtagttatggaattttggtgtcacttttaccatagaaataatcaattcccataactgcttcccccctttgcagcccccacagatttaaaaacaaaaaacgagccagggatctctgttagacagtggcacaacatgcccaaagtaaaactagccccctaaaaagaaaaaaaaaaggcaggaaaaaaaagccatgactctatgagtgtgtatgtatttatgtgtgtctgcgtgtggacttgcaagagtgtgtgtccgagtgcacatgagtggacgtgtaaggtaggacagcaatggatgcagtctctctctctcttttttgaggcgaaagcctggcttcccttcccggatcggccgcctgtgggactcgagagacctgtgcacgcaggggacgcggcggtgcccggggttagagctctcccctgtgaccgaaaagataattaaaaatcgcacgcgcaggagccagctcagctcctggctgcgcttccagttggtccggtctggctaaatgggttctcgcaccctggcggcgcccgggctgggaggccagtaggccgggcgcgaagagtaggttggggaccaggtgtcatagccggtggcgcagaatcgcttctcggagtcaccgagggtggcagtggcaggcggcggctgtggggcgggaggggcgcggcttggggctagtgtctgtggagggatttggggaagaggcaggaacgtggagagaaacgtgggaaagggaaagaccgacgagggaggcgtggagcagtgcatggaggaagggcaggtaaaaataaagccccaattaggaaggacagagtagtatcccctgaactccatccttacccctcgagagcgcacacctggctaccccgcacccccacctctgctcccgcggtctggcagaccctcagtcccccgcgcatctcttcagcggggcgatcccgagtcacgcaaccacagccccccaagctcatcttgtactcgaaagggctccagagtccgcgactggcaccaggcccccatcttccgtgcccctcatgctctcagagcccttccaggccccttctagggcgcagacccgggcgtgggctcagcgagtgggagcaaagctctaaaaccagacagggagggtcgtggcaggtcgctacgagggtgagggaggcgtttgcactgagcaataaaaacacccagtaatgggtatgtgaattgctttaaataagatgggagggcgtgagagatgacccaaccatctttcttccttgatgcttcgagggggaggcattctaattcttcatttattttataaaatcacttgttactgtgtcagctactccactaggaatctttgaaactttggcaactgatgatttttttcgcaaacacgttttcaagctttggaaggctttaaagagtttggtaataagcaagaaacgtagtagtacacaacgccgagggtaaaacggccctgtgcccccttcttggggtgtaatagcctcaagcggatttcccggcttctgcgggcgcagcacattgttttatttgttttgaaggctcagagtttgaggctggtcgtagacacccacgtgctctgactctcatcagcgtaatgatcgacttagccagagtcgtgtctatataaaccacaaaaacctaatcattagaaatcccagcctccaaaaaccacattttaggtaaaaagtgccgctttttttccgcgctccttcatcctctcgaccacaactttttgggggatccaaagtcgctttttaaacccacactaggaaataaatacataaataaacagccacggaagcattttgaattttttagttcgtatttttaatttttccccgtgagcgctggggaagacagacacgaaacttagtcttagatgtagaatagacttaataaaatatttaaattcatggaaaacggctggtgcttttccccagcaagggttttgcaacttattttaatcacaaagctgacagtttttcagtccttaaaacaaaaacaaacaaacaaacacctcattcttgttctctaggaatgacaagattgaatatataagaaaaaagaaatgtccagctatgcacttgagttcctaaaaactattttgactagatctccctccaccccccctcctcattttttttgtgtcacttaaaacaaaaaacacccaaaccctgcaaaatctttttcccttgggagtcgctcagacagaggtgggggtagaggtgggagggtgaagagtgctgagaagtcagcacagaggctcaagaattttctttcctcctctcctgaagttacaacgaaaaatagcgacagtcagatcagccgggggctctctggtgtctcggcttcaatctcttcctacaaagagggggttccttgtcctaggggtggggagagcaagaggacgcgacctggcgagattgcccctagtctggggccgcctctaggcttcggaaactgcacacggcgcgcggggggctccttctcgcggccggctggcggcggcagcggctgcgattcgcaggctcgagattcgttgccccgagatccgctgcccacgacttacctcttggcaccttgaagcgcgagagacaggggagctttgcaaattgcaggagggagtggatgcaaagaggtggctgtgagagggcgagaagaaaagaagggaaaggaaggagcctagccggggagccgggctggcagccgccgcgggaggaatctgagcgtgcagcccgcgcggggggagcggcggccgccgcggaggcggcggcgcgggagggcggaggcgcggccgcctgcagctgggtagcagcgcgcggcgcggcgcggcggtggcgggcagcgcgcggcaatgccggccccggggctggactgctgaacccacaccgcttcaccaccggactccaactgggagggggcgccagcgcacccaggacgcggtgccccaagggaccccattccaagctgcaaactcaagtcccccgcctccccaggccaaacacacccccgcgcccgttcgcagctgccaccccgggtgttccaaagactccggcaaagatctgcgcctcccgggtctccctacccgccagcccgactgcgccgcatcgccagactctgttggcccatcagactccgcccggcagtcggcctcatcaaacttgatttctcacctcctcagccccatcacctccatcctctttccccccgtctcgccttcacccccccaatttcctccttgcccctcatttccaccctcctccccctcccccggccacttcgctaacttgtggctgttgtgatgcgtattcccgtagatccgagcaccagccggcgcttcagccccccctccagcagcctgcagcccggcaaaatgagcgacgtgagcccggtggtggctgcgcaacagcagcagcaacagcagcagcagcaacagcagcagcagcagcagcaacagcagcagcagcagcaggaggcggcggcggcggctgcggcggcggcggcggctgcggcggcggcagctgcagtgccccggttgcggccgccccacgacaaccgcaccatggtggagatcatcgccgaccacccggccgaactcgtccgcaccgacagccccaacttcctgtgctcggtgctgccctcgcactggcgctgcaacaagaccctgcccgtggccttcaaggtaagaggctacaccgccccccgcccccggccgggagcggcggaacctgcccgccggtgtcttcctgcccacggggctgggccccggacgtcctccaagacctcctgccttggcggctctaaccccagaaacccccggccgggcctccctccggatgccctggcgggctcggggctcagtccctccgcgcaaatccctccctctcccacctgtgcccgctgccaccccgacttcagccctagtccccctgacccgttcagcactcctcatgcctcctgcctggccttgattctcactcactccttcgcgccgtctccctttcccccaggatccccaaagtacccactcttgcactgcgagcggacttgctccaccccgcccctttcccgggggcgaggatccccggcattgtcccctggggctcccgcgtccttccgggacatcccggcctggccgcattgcgggctgcccgcgcagcctctctttggggctccgcgcgctctcacccgcttccctcacagccaaacgcctctcctcaggtctcggcgtccccttccccgacccgcagagttcagcggtcctggtccctcccgggctcccgtgccgggattcgtggggtgccggtgccgggcattagtgcccggggctgggcgtggggtgctgactgaggcgcgcgggctgcgctaccagtgcccgggagggtcctggacaaacctagggtctccagaggagggggtgtcagggcgggggcgtttgctctgttcgctgacccgcgccagatcccgttaccgggaggaaggcggggccgctggggcgtccgcaagccccgaagcgggggcgttcagggggcctgggcgctgaaccctcgagtgctgggaggcgcgggccaggggacggggcgggagctcgggccgcttcttccagccgggaccgagctctgcgcctcgccccgccagggagggatgagggaaacctgtggaacaactttagttcgcccaacttgaaaacggaggtgaaattttgtatttttgctttattattatttttaaaggacttaaatctaaaaaagatccctcctgcttctgaaaggtggtgagaggctcctgctggtggcctgagcacggagtgagctcgaaggcttgagagcggcctctgcgcgccccgcagactcttgtgcctgcccggcccgttagtttgagggcgggtggcagccgcgggagtcgcaggcaggtgctccgcaggttgaggttttaggatctggagcctctcacagtagcccgatggctctccataacccgatccagatttcccggggtagccctctacaggggggagacgcggagcccccagggcccagcgcacactgggttgatggggaaacgggttcccaggctgtccacactcgcaggactgtccacactcgcaagacgccagggatgcaggggtggtaagccagacgtggagatgagactctcagaaaggtgctttgggcccttgctaacctctgaacttgagtaggtgggcctgggtcccctgggttctgaggtctgtggagagcagggcaagcaaggccttgggggaggttaaaaaaaaaagttgggggaggaatcatgccagtttctccgctggggaccctggggccaaactcccacgggccactgacagttcccagttgttgatcacccccaccccacgcaccaattcagattccgtgtgtgggtgggatggaaagaaagaggagtccaggtcaattagacctggttatctcgctaggacttatatcagaacagaaatcagaatgaattgttatggaaaggggatgttgcattctggggcaagtttcattttgcagttggctcaagaaatttttttttttaaccgtcacatttctccttttataaaccacccattttgtaggttaatgtttgcttccttgaaataggaaaagctcagaatacatgtgaattgtataaatttaaatttccatacaatatatatcttttacaatgtccatcgtccaagggcccagaatttttaaattagtcttatatgagaatggaaatttgtttccaccaacgccctccaatcccccaaaccaaaagcccccaaaaaccccaaacctggatgaaaacagcaaaaaatacaaataagtagataccttgtctgcacaatgccacaaatcagaatatgtgaaaatataagaacagatgcttacatttttaaagtgttccatataccattctgctaaacatatttaaggtctatcttgaactgttctcttgcatttatgcggctgaattgatttgaacatgagcattttggatggaaaggttgttttttgcactttagcttgagctagtctcagatattttggctgtcatctaagatttttcactaccaccctttaaaaattattttgaaaataaattttgctctttgttattaatcaacttgttaatcacacagagtacatttttgtatcttaagcagtaaacagaccgtaggtaacaagaccatattaaattgactattttaattcatatcaattgaataatgaattgagttaacctacaacctgactgtcaatgtctttctatcaacatacctgtgttaaacaattcaaaaagtgggtgatagctaagatctactcagtatagaaaatactctgttgagaaaaaatgtatggatgtttggaacatccagattgtgacaacctctctttaccctacttttggaataaaagcctgagagcactagactttctatactcttacaatataatcaaatacatctgcaatgaagaaataatatgaagaagtctcccttttaaaagtggtgacagcaatttggccatgatatttagagctatgtaaaaaatagattatagtggttgtcaggtcaatagcagataggtaaatggatttaaacacacacatacacacacacacacacaacttatttgttgtgaagtctgatattcaaatcaatacaatatttattgagcccgtattttgtatctgtcacactgagcttgacaccgcagagaatcagaaatgaattcaatagactgttttgaaatgtcagtttaaactcgtgtttaaacacgatattgtcaatctatttcattaagaatgtattagcgttgttcatctactcttgtttcgagatgatataaaatttatttatttttacatgtaaaaatgcaaaaacaactggtatactttatataaagttgtttattaacattgtatttttaacaaagttctgcagttttgaaatgttcggtccccccaggtgtcaaggaaacggaaataaatatttttaacattttcaggtgtatctcactgaaaccttaaaatagttagggcatactattagaggatcccagaccctttctatcctagataattctagtgacaaagaagtaatttgcaaattcagctcattagctgatggtcaggtaacggtggagagagcgtgtcaaccatgcatccagtagcacccttttagttaggggtctgtcagcatttccactgtgaagcctggtgttcagggttcgtaacttagttgccttaaatagcttcaagctgaaacactatgcagaaattttaagtccagatgtatattttaaaactaaaagtagttcaagtctattctgctgttttaagttagagaacactggactacatatatttatcagtatcatatgtttttctggcagtgttaaagaaagaaaacacatttttagatatataagctagcactcatagttaattctgtatatttaataatacctttcagtgcttgtcaaaaggaggggtttcaaaatgacagagcaatttctgtttgaaaataaatttttggcatcactagccatttttctctcttcgaaaacaaatatacaactggtaaatacttgataccagtgagtagtatttttcttacatagttaatgatcagattttatgtttatattttttgaatctcattgtatctaaactagggaaaataggttgttaagcctgttaaatccttattaaccgtaatataaattattatgcaaaattatgtaaatcaatagatttcaagttgtgtgaagacagacacatttttgtgttatgcctttgaattcaagaaaacttatttaaagttaaatattttgggactgaatatataaaacttctaagtaaggaagttggaacaaagaatttcaggtggaaaataaatacttataaaattttttagaaaacttctattaaatatttgaaaataggtatggtagatatctttcattattttttcctctttggcattattgtttgtatcctttcaaaattccagaatatctattgttagatgatctaaaccaccatgatacatggcccacaaattgctgctttacattgaaataatttttatcaaaatttatctttgacatatatatttttaaaattatgaaatgacatattgtgttttttctctaaaattcaatgggcttttcctaagttctaggataaattcaaaatattaactgtagtatttgttgaaatgttttgatactgtatttgaagttatctttaagtaattgtgataggaataacatttttgctttttgcaattagtctcacttctctttttattgcaaagaaagatttgatcagattttatcttgaaaaataattatatttcaattataccgcaagtacaatatcctgaattattttggcctataagagtaattgattagttaagactagacttctgtccatggaaatgtcataggcaattttaatttccatataaaaagatgagaaactgttttaagggtttgagttaattctccattcctcttcttttagtgattcacagatttagtcataaggagtctcatacaaaatttcaatagcattactacagttaaatatccttctactttattttgtgcaagccacatatcatgtgatttaaatgctagttatggtgaggtgcgctaaataaaggaacgtctttctctattctgaaatgtcaggacagaaaattacttctccttttctcatggagtttcttgaatttgtagattttatattttaaaaaaacatagaaatgtaattgttaagatcatcacaaattattctttgcagagcagtacttttgtattgggtaggatggaagcaaattctaatttgtgcttattcctaactagttaaagagcgagttttgactgcactttaccccttcaaatgtttttccattgcttggttttggtacagatgaaatgtgtaaaaatttcttgattcttttggttttcttttagataaacacagttgagaatctccaagggaaactttttagcttcagagatctacttaaagaaaaaacctctcaaacatataattatacttctgattgatataaagtcaaatacagtacttcccccaactcccaaccttttctccccctcagaaaaacatcgggcaatctgatttggtagagtgaatagcagaaaaaaaaccaatatatttagccattaaactagagttcagctttaacaggaaagattgtcactaccttgcattagcattttttttcaggtcttgctctcagcctcatagaaggctcacacaacttgtgattatttatttgttttgtaaaatgtgatacgtaaaacacactaatattgaatatggtcattattatactgcttaagcacagtaaaatggatgtatgtatttcactcttagggatcttttctttcatattttcccatattgaatcaattttccatttcttctaactaaaaaaaaattcattatgttaaaaatatgcagtaaaataataatgtcccagagttcttgaaaacctttatattggggcagattgctttttttttttttttttcggaaatgtagccagacttgagtgaaatccaccagcagtcatcctgtatctctcaacaacatcaaagaacatctcagaacatgaagtgaggaagtacgtactcagttgaaccctttaagaatgcttataagtaaaagcctatgtttaacagacagcagatttggaacagaacactgtgttaccctcctcatcttacaaaaagcacatcattataattacactctatacttatatagtatcttctacattttgcagactttccaattcatattggaaaactgtggttcctggagatgaagttattttgtgtgaggtcatagcagatatgtagcagaagtggggaaaaagtggagcctcttgattttggtatattcattctcttctaaacagtacaacttttctcctgcctttattaatatgcttactgggtccatatttactttgacatagaaagccacgcagcaggtgttaaaatacaatatgctgagtgtacaaaatgtcaaacattcagatgaatcctggcgaatgtagtcaattattgcagtattttcaaatgttcacatttttggcatggtgaatttgaaaaattgaaaagcacattgcctccatcaggagtacagcattacctgtattcagtagccgcttgagatatgagatgacgtgtacagagaggaagtcttattttcaagggattttacttttgatccaggagacttctcatattgagaataactatattctccagggaaagggaggcagcatggttccgtctcctctgagatgaaaacaatgtcagaaaacaagctgggggcaagggcacattgctgttagcaaggggtgctgactcaacattaactggccctctcagagttttagtgggtagccccacagacttctgtctctgcgaagtggggctctttatggagctctttcatttatttcaaaaatgtttacctggctgggctcggtggctcacgcctgtaatcccagcactttgggaggctgaggcgggcggatcacctgaggtcaggggttcaagaccagcctggccaacatggtgaaaccccttctctactaaaaatacaaaaattagccaggtgtggtggtgcacacctgtaatcccagctactcgggaggctgaggcaggagagtcacttgaacctgggaggtggaggttgcagtgagccgagatcgtgccactgcactctagcctgggtgatagactaagactccatctcaaaaaaaaaaaaaaattaataaaacacttaccatgtgctggacacttttgggagcagggttgataagtggtgaacaagacagatgagatgaaggcccttctctcgtgtagtttcctaactcatataatctggactcctaggagtgagtccctcagctttggcctggtatatttaaagtagtcatagaccattaatattaacatatgtacgttgaaatgaggatcacttgagtacattgggaggctggggaaagtggggcctgtaatttaaggaaggctttattgattttgaactgaataacacagtactaaatggaaggaatggaactgagaaacagcctaagagaaaagtaagggtgacaaaaatattgacaagttttttgtttgattgttttcctggctggaggagaggacatagtgaaggcgtgttgcagtagggttcatggatgggggaaattcagccctaaaatataggtatagtgtgtattatcacactgttaagaaatctactgtaatatgccaattgtattgggaacatggaattaaatgcttaggtttgtcttatggaaatcttgacaaaggagggagtagcactagaaggagaaaaagataagtgggaggttcaccagacaggcaagcacacaggggtattattgtcagacagctgtgggctacttgagctgcggtcattgctgagttaccatgagggcatctggaagctgaatgaggaagacatggaaataatctgaatatagagtcctggaagttcgttgagagaagggattgttaccaaggggcaggatcttggcaatggattaggaggagtgtttcatatatgacagtgaaggatctgcaccagcatctccttactgggctctgtgttaatcaaaggcacacatttgcatgttagctgactcaggttaaagtgttatctctagtcttagagcagagaaaatgtttgtttgttccaaagatggattaatctagatcttttcttgattgagttaatttgcttcagattaactgttgaagattaagcagtcaagtatgtcattccaggatggcagatgggacacaagacataatagaactgaggctaagggtatatattgtttttttcttatttatcatcaattattttcaccttcagtttcttgatgactttggatatcacactgggtcccaccgcagtgtggttttcagtaaatatactttattaaaagctgaagtgctagcccaaagtaaggagataaaacagactacacgatatctaggctctatgtagtgaggagccccagggtttcacttaaaaatcttctcccataaagttgaccagacttgatattttttagcctgtgatgggataagaccacacctcagggctctccctgagagaaagcctgcagacaggtggtgccttgatctgtatgatgcaatctgcagatggggcatccctcttccttctgtggcataattcctacggacagcttaacatggggatttaataaaaatgtacatattttctgtgaagaatccaacaacaaatgaaagaagtttttgcctgcctttgaaatgggtggaccctgaaacattggtctgtttgaagtggcatcacaacccatacacagatgcttcattcctgtcggccattactggactggactagaacactaagtcctgataagacacatcatttgcaatgagaatatattctgtttgtaagcctttctgatgtgccattattgctgctgtgtttcctgttttatgtaggtggtagccctcggagaggtaccagatgggactgtggttactgtcatggcgggtaacgatgaaaattattctgctgagctccggaatgcctctgctgttatgaaaaaccaagtagcaaggttcaacgatctgagatttgtgggccggagtggacgaggtaggtctctgacttttgatactgataatagaataagcacattaggctcctttgatgaaatgtagactagtctgtatacaaatcagcaccttctttttctgaatagaattactgaagatttgatttaaatacatccagatgaagttgagtgtttttctgagtactcaggcctttttcatttattttatgatattgaaaattcaaacaatgttttcagaaaaactagctcctaatttcactgggtgtgagcatataaggtagagaaaagaacagttggaggatcaacttctgaattatgaggagtcaaataactgagtaaattgagtggtaaaggggaaagaaaaatggatatgttggatcaatttcctggtaatatcaattttggtctaagttgtagcaaggacagctggcataatgctcttcacttatcacaggttacctctatatgatttaatttactctcatagtaagaatttattaaaaaccatggtttttttttaacataaggcttttcatttgaataagtgaataatgtattacttatgttagagtgactatgtaaggttgcctagacagatgaatgattagtactctaatattaatagttccatactatgtaaggattcccatcatctgaatccatattcaaaaattagagatccttaaatagaaaattatcccttttagggtttttgtaactgtttgataaatgaggttaatgttttttaaaaaagtctttaaggaggccaatattttggcttttatttacttattctacagaaagacttttactagttactcactattagaagcattatgcttatttatttacttaactgaatctaatatttccattttaagtattttgataagaagaaagaaaatagaccactttagaactgaggtgaaataaagccttatggaatcattgcaacccaggtttgaataggaaatgaggagcaccactttttaaaccatgtctaataattgctctttagtttggatcagatgtcaaattattaccattgtaaaaacttgataagggaaattcaagcaaggctgtttccgatgagtagtgttagtttactttctaggaacagggccaagaagttgtactttttaacttaaaaaaaatgattcatgctaatgagatactgtcactgacatgttgtttgaaataaaatgaggctcacagcctccggtagaatcaaaactaagggagttatctctgcatcaggtttagttaactttcataaaaagaagaaaaaaagacacatcctatatcactattgactgattaggtttggagtatgtgtgtgtgtgtattcattcttcctttttctcatttacttatgcaggtccactatgcaattaaagttttcctttttttctagttagaatcaagaaaaatgtgaacatgatgatttacctgtatgctctgaattgcatctttcttcttatgtaataatactttttttttttaactagagtaatgaattttagtttttaaaggattgggtgccatgcttaattttacattacagattcaaactagtgttttcatttatcttacttttgtattatatagatgctgcataacttttttctgatcaatttaagtagaaagtatggcaaagtgatagtgtactttgtaaaccctcaacatatttatttaagaaacttcaaagagaaacaaagggtgtgcactgttttactatattggctttctgagttttggctggtttcccaaatagcaatttttatatttaaaaaaaaagacagacttaactgcttgcagacttttcacgcatggaagatgaagaaagcttcttttgatgaagtgtaattatgtccaaacagagctgaccccctccccctatatttcttatgatcttaactgaagaaagtaggatttttcctttgaagcagccgggacttggtggaggatctgaaatgctacagtctgctgccagaggcaggatggagaaattggtccagacttgtcttcaagacttagatggggggtagggggagtgggtggagagagaaagaaaaattgatttatcactaataatatatttttatatcactgcattaacattgtatgaaaggaaacagtaatatcaagctgagatgaagaggaaaaaaggacagagaacactgataacagatcacactctgaaaaaaaaatgggtcagtttttcagtggcaggaaaccctttaacctgcctttgtaccctttgtacctgacctgctttataacagactcttccagcttcctctttgattttcacacttctacatttctcttaagctattaagtctggatcaacatgctgctaccattgtattttctttcccggctttaaatatttctattttcagtagtgttataaaaaaacaccaagttcctcaaatattgcacttttttttttctttccactggtagaaacataaactctcagaaactgaaaaacaatcttagattataaaggagtcatgtcactactgactttgactttatgggtcatcttatgaccacaacttttgaaagtgctagaataaaagtagagcatcagtggaacttgcattaagttaggagaggcttaaggtttttcatggtttttccttttttttatccttaatcttttaaagagaagtgtttaaaatgattttggtccttaaatttttttttggtatgctttctttttcctgatgaagccatggatgacacaattagttatctactgactgctagctccctatttgagagcctacattttaaaataacaggctgtattttatcacttatggaaagtgataaaaaggggatttttgagaaaaaattaatttaaggaaatcatgaatgcccacataaacatttgacttaagaggtgcattattattataggatgaagaaccaattactaaattggttggtaatttctgaaaatttcttcaacattgcatacatatttcttctgaaggggcaataagaagcagaaggagcctcattcacttttgctgtagttgttaattacatcttgatccttagggtctgattttggcagatcatagttatacttaactacttgtttcctcccccaaacccatctctttttaaaagcagttttttatagagaactcattctactctgaaaatttaaatgctttatacttgaagggtgaattttatttttggcttttgttcctacatgaggcgtcaccctgaatttaggggaagcatagatgacttttaatatcctaagtaagttgtaaaggtctcaagtagaactgttaccaaaactggtttaaataaatttatggacaatctattttatctttttttcttttttgagatggagtctcactctgccacccaggctggagtgcggtggcaccatctcggctcactataacctccgcctcctgagttcaagtgattcttgtgcctcagcctcttgagtagctgggattacaggcgtgcgtcaccacgcccagctaatttttatatttttagtagagacagggtttcaccaggttggccaggctagtcttgaactcctgacctcaggcgatctgccctcctccacctcccaaagtgttgggattacaggcgtgagccaccgcgcccagccgacaatctttctaccaggttatttagagacattaaggataactgagatctgtatatatccttgatttattaagatgagtgccatagatgaaaactgactctgaaacacagccatgggagccactgttagaaaggcaatcctgggcccatagaccactaatctgaccccaaaatggcactttaaaatgttttagtgtaaattaactttcaatctagagattcagctcttttactttttgcgatctttccattgttttgaggttctaacttggacccagtggcttcctattcaagtttctggtttctaattctgtaggcttttagttttctgtaactagtttagactcctggctggtttattcttctggttagtcttaacgcttataataaagcctctctttgctaaccaattataaattatttaaatccgtgtaatagccaatatagtggataaaatatatcaatgacactttaaaaatagatgctttcatcatcctgagatattgcattagtccatttatgtttactgtttcttgggcacatagagctgattgggacgcatctagaaataaattacttattaatttttttaaatggcaagtgatcaagccacttaaggaagtggccaagtgacagaatatttaaaaaaaaaagagcattaattttagggtctgaaaaatgaggttcagatcttcattttttcatttattagttgtatgaacttgggtaaattactaagtctcttgaggcttcagcctccttatttgtgcaatgggggtgagagatctaagcggggaggattaattgagataatgtgtatgaagtggcacttaatacgtttctaattgttattcacctttccctattcaaactgcacccaccccattcctgtcttttctttcctgtttttttccccttggctatagaaaagtatagccaaggagacttaaaactatttatactcagtaacaaatgatgtgcgtcttaaacagattttaggaacttacatggtctaggttgaaaagaaaacccattcactagacttgacagccaaagacctgttctccattaagccttgtatataacctgttccatattaagctttgaaaagactgcattaaactttgcattggtacatattgtcaaagatttgtgttttggtttaatactctcagttttcagtaagggaaaaagaatctctgaccaaaaaacaaagcaaaacaaaatgagctttttaaaggtctgttacaggagcagactgaatgagtactctggcctgagattgctgaatgttttattgagtcactgtttcacgcccacctcttcctgtcttgtaacagtttgcagttttgactatctgacatgattaaccgttgcaaatctaactgattacaactgttagtaagtctgtgcaacagagaatggtatcttcttctggagaaaacagacatccaaatatgctaccaaacttttccctgtctcttttccccttcttattcgtcgcttttagctcattaatttgaagcatcagatgtaatatttcaatgaagcacaccttctgctaaaagcaaaatttgagtttatactgagagatgtcatgttcatttagcaaaaagtaagtcgctgtcagggggttatttcaagatttaacagcaaggatgtatgttaggggaggggtggacagggaggagaaaaactttgttccagtaatgatgaaatcatcataccacaggcacattacggccaggacaggagacactggctcctgttaaaatgattcccataagaactttcctcttttatcttcttattgtagtgcagctaagcaaatgaaatgctaaagctatgtgaagtaaataacataatcaacaatgatttactattgttctctcgtgaggtcatgacccaaccctaaataaagacttctaaaattgtctgtgcttggatgtgttcctgatgttggagaaaactgaaagaaaaagaaccttcctcaagtggaccagggttttgttttcattacaactgttgctactgaggagcttttttggaattggagtcttcctgtgtagcactacaatgaggacgatgatcttgactctaagcaaatttggaaatgtcctaaagtggtcatcggagggtttccaatttagaagaaggagtcctgcctcttgtctttgtttcattgcctccttagagatgcttaaatgcaatttggaaatctatgctgctgtgtaatcatcaacactgttttttaatattcactgtatattttccccttttatatctgcaggcaagagtttcaccttgaccataaccgtcttcacaaatcctccccaagtagctacctatcacagagcaattaaagttacagtagatggacctcgggaacccagaagtaagtactcccctttttattgaagaaagtaatagagtttccagagaccctatgaggaatttattccaaatgagttagtgtcactttcatgtccatagtgtctttgtggactttgctatctgcatatattttttttagtgagggagagttagtcaaacttcagagttagtagaaaataaaactacggttttaacctttgccacacaatcactaaggcctccgtagctttgggaaatgagtgaataattattcagtcactgttaactatttgctaagaaattttgctcatgtactgaacataatggggcagaatagacccatgagagctgaggaagaaaagagcaaacttaaaaatcttgagcttagtcaaaaagcactggcatgtgtttcccatggcctaagaatgtgttttagctttttaactcgcccactcaattccctttatgaagagcacactgcttaattacaaagaatttatttgcaaatgataacttgcttgattgttacaacactgttgtttggtcatgctctagtaattgttataggtagttttcttttaacagatagagtcaaaccacgtttaaatccatcttggtttatttgtctgtctggacatccagaaggtttcaccggcaatcagtttcaggtagcgcacataatctacttgggccaatatgtatgttccttctaaatctaaaatgaccgaggtttgcttcccccacccccaccaaaaaactgctttgaacaaactcagcatagcggtatttgaatatatttagagattaaagattatttgatatataaaccattaacaattgtgtgccaatggaaacatcatatagaactctgcctttgctgagtgaatacattggaatcctaaccactgcatttagggaggtcagtttggtttgtggtggaggcatagctggcagaagtacttgttctataacaatcaacctgcatagaccatgagagtggcatatcttttcttcccctaaaatgagagaaaaggtctcataaagttttgcctctacccaagcagcataccttcctagcagtgggagcatatggtgggtcccgtcccttttgctgctgtctcttttcacaaaggctgactgcttgcctgaactagggaggtttcctgcctcaaaagcaagtctttgaggtttttgttttcttctcctttcatgtgtgtggcattcttccaggttcataatgttgagtcagtgctggccctgtctgttcagtttgggaatgtcctgttaggtgattgctgtacacatgtgtgtaagcaccaagtctctagtcctaagggctagtggttatggagtgcaggtgaatagaacagagctttgcctggtttggggctttgcctgccttttctggatagccataagttggggatgatgccttatgatggaagatgtcttctaacttttggtcagactagccccggaattcctgaaaaggcaggacgtccattttagtaatgcacatagcaggatagttggtttttaaaatgtagcaccgctaatacttatctcttaaagatatttcctgctgatctcagctgcttttctcagttcttggaaaaaccatttgcgtgtgtttgtgtgcgtgtgtgtgtgtgtgtatgtgtgtgtgtatgtttgtgtgtgtatatgtgtacatacacacaagagttgatgctcaaaagttgatggctgggagaggaaagagggaaggataggtgctccctgttctgaacgatatgacaataagtgagaaggcagggtagctttggaaaagtcacttctgtttcaagtgtgcatagcagtaccttatttcagagaggtttttgtccaaattagtcaatagactaatttataaaggcagagaattgccttgtaaaggcagagaagtgctctgaaagcagtgagagttaggagtagaggggccaggtggtatacgtgggacctgagttcaagctttgtgtggtgcccagggtgggcggtggaagcagatacagatctgcaagtggtaggccacctgccctagataagcctgagtaacatttcttattaactgaaaatatcggtgaaaatgcggggtcattttcctgacatcatagggtgacttgacgaagtcagtgtctggagagaagcatgggtctgctttgagcgacagctgaatcctataacctggattctgtgctggattatttttttcctccctgttcttggccatcctgggcattgaatatttgtagcatagccctcttctcaatatggttctttaattttgacactcccaggtgtgggaaatgcacaatatttccaattttcttaaacagtgagtataataggagtttgattagttggtgcatataatgttaaatgggagatcctctagaacacagactggcacacgttttctacggagtgccagatagcaaatcctttagactctgtgggccgtatggtggtctctgtcacaaccactcaactctgccattgtagctcaaaagcagcataagcaaatacatacattcatggtcatggctatacaggttgagtatcccttatccaaaatgcttgggaccagaagtgtttcggatttcaatttttttttttaatttttggaatatttgcgtatataatgagataccttggtgatgagacccaaatctaaacatgaaattcatgtatgtttcatatacaccttatgcacacagtttgaagataattttatacaatatgtaaataatttcgtggaagaaacaaagtttgtgttatgtacttatgtgtggaattttctacttgtggcatcatattggtgctcaaaactttcagattttggagcatttcggattttcagattaaggatactcgatctgtattccactaaaattttacttataaaaataattggtgggccaagttgtagtttgtcaacccttgcttattcaaagtggcttattttattgatccttaacagagaagggctttagtaaaaggctttcctggggcagtgttggggcagggggagtggaacaatttatatgcaattgtttagcctcctctcccccaaattataattccttaattagtggttattagtcataaaagtagtatacttctgtttatcacttatagtggcttgaagttgaggattttgtactatcggttcctgttgttggaatttcactccttcctctaaagatctgaatatatattgaaaagcctgcttctggtagctcagctgtttgaacaaggacaaattctgggttaactggttgggtctttatgtcggactgcttggatcgaaatcccaactccatcatttattaactgtatggaggcaggcaagttacctaacttctctttgccttggttttctcatcttttatgtgagaatgataataccttcctcatcagttgctgcaagaatgttaaatattgtaatgtatgtaaaatgggtagcacagtgactgtcatgtagtaagtgttcattaagtgtcagctattattacatcaattttctttagtgtcagacgttggctgtagagttttgcttatggtatgcctctaggaaacagataacatctatagattctgttctctagtatattacttttttccccctgcagatgactttactaatttttgctcattagtaaatgacactaataagtattataaattatgcctgagcagatattcatgctcctcagggaaagctgtgcagaactgatgataaatttaatttgtttgcagcaaagtccaagagcagatgctatggcactagtaccccactgtgaggccttgcctatcaacacatctgccaagacttgcttttcactcaaaaatccaaaaggtttcatccttctatgttttctgtctctggcagctgaaccagtgctgtcacatcacaaacaacttcttttcttaatatacacatctggcgttggcagttggactaacttcataagagcacatgatcatcactcattacaagattaaaaagtaccctatggcatcattgatgttttttaactttgatcttttgcagttgtgattcatctcggttataaaacttccctttaaaggaacatagccgatgacttattagaaccttcatcttaagtagcgtaaacatgaaaatggtacacatctttacaaaatgccatttattttctttgccagcttatcattttaagacatgacatcatacttaagatcccaaatttgtaagtcttgtgtttaggcaaggcattttgaccttctgttggcaagctagctctgaagaacaactgtcagccggagaagtggtgtagcagcagcagcaatagtaatgcatttagatacctagctctttgaaacatcggtttctattaggatcccttgttccatctgtggacttggttccacctccagtctgatttaaataatttctacaggaatgtgaaaacttggttagcaacatcatattctatagaagtggttcagagttagggaagaggactgatgggagaaggtattatttgttgtgcagaggatggaaaaagtaaataagcttacataggatactttaaattctcttgctgtattttttagttgtctattactaaataataaactaccctcgaatataacatccagtttattatttcttatgattctgtgggttgattggggttcatctggatggtttttctatttgtcaggcttggggtctatcatgtagctgcaatcagatagtggctggtgctggaacatcccacatgcttcatttatgtgtctgatgccttggtgggatggctgcatggttgggctcagctggaatgatgcaacagcaggccccactgcatctctttccatataatcctggatcctcttcctctccacgtggcctctccatgtggtctttcccgctgagtctgacttctcacatggcggcagctcagggctccctaaggtacaaaagtgagagttctcaggccttgcttttttttttttttttttttttttttttgagatgaggtcttgccctgtcatccaggctggagtacagtgccatgatcatagctaactccaacctcaaactcctgggctcaagtgatccatcctctcacctcagcctcctgagtagctgggactacaagtaagtgccactatacctggctaatgtttacattttttgtagagatggggtctcactatgtttcctaggctggtcttgaactcctggcctcaagtgatcctcctgctttggcctcctgagcagctggaattataggtgtgagccactgcacccaaggatgttgggccttcttaaggattaggctcagaactggcatggaattgcttcctctagatttgattggttgaagcaagacacaggtgcagcctggatttaagggaaaaaaaccaccaatggtgtgaatgttgggggatgtggttcatgacaccaatgtcatcaacttacataagtgcttagctggcagttgtcattgtcacaacaggaaaaataattcttttcaaggtgccatcttctgaaaggactcttggctttttcaatctaggggacattcaaagaaaatactccaaatttactagtctaatcgtagtgtcattctgaattgaacagatttggtaaatatcagatgaattagtggtgggtattcccttgtggtgcttggtattagcagatcactactcaagtgagaagaacattagatgtttgaacaaaaagaagtatgagccttgcccagcaacatgacaagtctgtagcagaaatatcttatgaatcctcagatggttaagattagaggttttttttcaatttttaaaattttttttcgagatggagtggcatgatcttgatctaggctcactgcaacctccatcttccagattcaagcaattaccctgcctcagcctcccaaatagctaggattacaggtgtgtaccaccatgcctggctaatttttatatttttagtagagacgggattttgccatgttggccgactgatatcgacctcctgacctcaggtgatctgcccgcctcggcctcccaaagtgctgggattacaggcgtgagccactgcgcctggccaagattagaggttttatactttgtatcatccaactttgaaattcttgcttgctggcaccttggcaaacctactgcctgacacatgtgagtgggtttctaaaaatttttgtgtgtcgggtctcaggtaggtaaaccatatttactctcaaggagagaccaaagctgtgaattgtgtacttcctgccagggcactggcattcaccactgatcagccagccacctgtctcaacctggtgggaaaaaggagaagctctgcctttttccctccggtgatctagctcctttcttgcaagctcagagtacatggctgcaacatttctctgcttgtctttgtgtgtagcttcagtaagggtctggggcttaggttagtgagaggttatctggaagtatagggtactgttggtatttctaggcttgccttagtatcctgcttcactcagcttgttaggcttaggtcctgcagctaaactattttcttttcctgtttgcttattctcagttgtgcccaattcatcaacaaatctgtaattgttcagagaagttttatttctctgtatttttgaggcatgtccaattgcagaagttttaccttaacaaacttgagtgaacagacttaacgaaacaggtggtgtaggcaagacatcatctcatttttctcttacgctgttccacctagttctgggactgctttccagcctggtgaagggtggagagaatggaggggttgacatttttctcttcctcattccagctgatgtcagcggcagctcgcttttatcctccattacttttcatcttagttgggtgaaggaatagactttttatgccaaaggctagcccatgacttttgcttatttaccaaaagaggatgcttattttattttattttatttcagatggagtcttgctctgtctcccaggctggagtgcagtggcgggatctcggctcactgcaacctccacctcctgggttcaagcgattctcctgcctcagcctcctgagtagctgggattacaagtgtgtgccaccacacctggctaattttttgtatttttagtggagacgggatttcaccatgttggccaggctggtctcaaactcctgacctggtgattcacccgcctcagcttcccaaaatgttgggattataggtgtgagccaccgcgcccggcccaggaagatgcttatttagagattggtcacatgtgaaataaggtgagggtacatgtaaaatatgttggatagagggacagcagatgtattttttaagattatttgattcttctggacacagttcttgcattcacattcttgcagtctgtgaggatgatttgaaaaaaccttgatagcctttgtgccatgccccagatgctgcaggcctgggttttagtccttagcacaaagcattagtagagaagcccttaacttcctgactttcagacttcccctgggttcttcactgtctccgaagtgcccaaggaatagaatttatgggtaaatgccatgttttgatatttacaagttggcaaatacaagcagcaatttgattgtcatagatattaatcacttggctaccagtatataaaacatcgttgaaaatctttaacttaagagaataataacagtaagaaaaccccactgttctctgtttccctttcttcaagaaggatgaggggggcggggggatgggtcagaagcgctggtggaggttatgtctggtggttggtggaatgtgctcttgagaagaccagttttaaatatctttcagtcctttttttttgttgactggctgtcaggagctgggaagatagccaagaaggaaatgacacatcgagaggcattttgtgttgtgcaacattctgtggaactgatgcaaggatatatggcctgtttacacattccttcgctcgcagactgcatggcagtaatttaattcagcagcacatggcatgctgcagcaaggagctatggcattaacatcctttcatggcaaattatcacagccgttaaaacatgctcgtgtccctcctttgcactcttccctggcttcccagctctgaatatgcgttttcattgtattggacttgtgttaacaaggtgctgtagctttcacagcaagagcacagtttccacatgcatatgttccagttgatatatttacttctaactaaatatagcatggcaagttttcaagtgatatgtgttctaaaaacacatacatgcttgatccaaatgtgtcagtagtttgtatcttagtgtaagtcagagatcattcattctgaaaatagtgttagggacttgacagggacttgagagaaagaggttcccctccccccctttttttgtctctcttttttttttttttaaataataatgacctttcgttctcaagaaagataattcctgatagatcactgaaatattctgttcacctctattttgtttgtgccatggcaatttcttcaaggaagactagaccagtgaataggacatacttaaaaatagcagggaaaaaaaagatttgttgtattgcttttcccattcatacctgtccatacctagcatttttataggatacatttatgatgtcaactaaagaacatctttggccttcacataaaatctctaaagtttttatttaagcaggtataaaaaataattaattgctcttgtttgttcaagtaattttggaaattaagaaaaggcataaaaaccatttaggtctaaaatattaattcaagatcatatgtaacagttaaaataaaagactgtgtttgtaagtagcaaaggaagggctccagttctcataatttctctgctactgcacactggtggtgaaaatctatttgttggaagaccaaaactcttcattaaaatttaggtttaaggcttaaacccaagcacccctggaaaaggtaactcagacttaaattcttattaagataaaaacaagtgacatagaatcattttttgggaagtaggttttggaagataggggaggagtggtcagtgaaatcctgggtactagaaagtaaacagtgagtggcagtgtgcagcaggcaggacctttgccggccttgaggccagtggttgccaacttcaggcatcacagttttgctgcaggtcaactgtagcaatgagcattcctgatgctttccagttctgatatactcttaagagtgcaagattttgttattgaaaggtgagagttttagggttctgtatttccatatctctctcttttgcaaatgttttcctttcagagtattccttttctgttgttctagatacatgctagctttcctactctattggtttgcaagttatcattgaatgtgtttcttttattttagtattatctttaccattttaatatgtatatttgtcttattaaaattaatcatgatctctgtccatacaagaactttagcattctttaaactgcagtctcaccccctctcttctaatgtcgttatctgatattttagtagatccttgttttatatttcctggattagtcattatcggtgtttaaaaaatgtttatacttgtatttatccattatgtttattgattcatttgcttatcattccttctttcaccttagttcttccttttaagttgagtttgcttttttcttgatgtagatccttcagtaattccttcaatgagaaactgttagtgtgaaactctcagagagtttttattcctgaaaatgttagcagttgtgtgtgttagctgctgccaacatgcggtgatgtgagaggcgttctgctgaaagcctgtctgctttgagtgcctgagatccacacttccagtcattcctttgtattgaaactttcaggtcattattatcaggttagctggagtagtatttaaggaaatggaacacaggacagataatattcatgaaagatggtggaagggaaatgtttctaagctcctgtcactctggagaactctggagaggtctagggtcagtgagtggggaggaggtcagagggaatgttcctgcagaggagaaagcaaacggggaggaaattaaatcccttattttacacttttgccatgggcaggcactgagttgctttggaactttttatccaaatttatgttaaagaactccaccattacacttgctctgcagaggtcatgtggctgttgctccctgagcaaccggagcaggaatccttagatattggtgtccacacgtttctgtcattttggtgagagtacaggactcagaaccacaagagctgtcttttgtagggtaaacgaatcaacgaattaagaagagggaagaaaataatgtgtggactagaggaacatggtttaaaagggccaggagaccacgatctggggtgagactagctctgggcaaggtggatggggtgactccagtgctggctcggtgtgtgtcttcctggggttgtgcagtagttggcaggtggggaagacatcagatgacactgaagcaagctggtgctttctgccttgccgtgaactctcagaatgcatatgcaccctccacaacatgcattctcatcttctcatttacctccttggagttaaattttatgagatacaatctgggtaaaaacgctagcatgtattttggttgcgggggatactcaggatgattaatctgggccttatgcctccttaggattggcccaggaaattattagtaggcaaagatgggcccttcaaggagatgatgaaggtaccaaatgcaggttgttctacaagaagtgaggagaaatatagatgtgtaaaaagaagggtgagtgtgaagtctgggttactaattctagagctttggtttctgtttcaccccctcactgtttactccagcctacaaaaacaagtgacaatgtgttttctaccatgaaggctatttcagagtagcttaacagggaattaatctgtaagggtagtttgtgtttaagaggtggattcccttatggctaaggggattggaggactcaggaattcttcttttgagacctcattgccatctttgtgaccttaagcaaaccactaaacttttctctacttctatttcttcatctttcaaatggaaatagacatgaaggcaacttcacaaagtagctgggagtaactcctaaggaatgatcataaagtacttggcacacatgaagggcagcttaaataccaattagtaattatgtagcgcctttctgccaaggagttccaaatgcttagacattacctcagtgattctctgtacatctctctgagggaggcgttatgcattttacacataggtaaactgaggcatggacacctgagaactcatttgtcctatgttactctgcaagtcagcagatgatttatagagacaggcaaggattccagatattttcctgtttatcctgttgccgtttgtcaagtctgtgtaagtgttgggcccaggggattcttggttgatgtgatgaagcagtgttacataagaagcatgcttaatgctgcagtagcatcgctgaatagtacagaagtcaaagttataaggcctggcacagagtgggcatgcagttcatggacataggcatgtttgttgaatgagtattgaattcattttaacagctgaaaacactgaattttgtgagatgaaaataatacattgtataacttaacctcaatagaatcttactttgaataccagtgaaatgaatttagtacttaaaaaaaattaactttaaaaaattgcacaagtgaaaaaattgcacactagaaaataaaaactaataataacaaagaagaagacagagatcactcataattgcatctcccaagattaccactactaacatcgtgatgtgtatctcccagatattctgtgatagataatgctggtactgttatgaaagataacagaagttggggaaataacatcaggaaaatgatggaatgctacagaatggcatgaccacattgaagctcaaaggagagcgaataactggaaatgaggataattgctgtaaggaaaaggagcatgacaatagaaccgacaattgtttccagttaatggctgcctctgtgatgtgaagggcctgtgctgcctgaatgatgtgggactagatggatctgagaaagatccgttcctcccccaaccctgtcccaccactgaaaataccatctccctttaaaatagctgacagagccttttttttggtgacaattagagatgtgttttaaaatgtaaatatttccggcatgggaacatttattcattcaaaaaattacttttgagtgcttactgttagccaggtgccaggcaggcgtgatcctccctttgaggagcctacattctgtagagaaaaaaggcaagaaacaagtaaacaaacatttctctataatcacatctaattgcaaattgtgataagtgctgtaaagggaactgatgtcatagtaaagagtaatggagtgggagggaacaggatggaacctattgaagagtggtccaaggaaggcctgtctggggagatgacatcggagcacagacctaaagggtgagaagaagccagtttgaggaagagttgggggaagagacatcaaggcaaaaggtacattgtgtgcaaaccttgaacacagtcagtatcagaatctaatatctaattttgcaaggtgagagggcattagcaatgcctacatggttgggaagaggttgcaaaaaaagtagactggactcacacacccaaaagtggctgtttataattgtacccaaggctggtgtggtgtaattagaggagcacaaaaggactcttcatgttcatccctcctggccccaaaccactctcttatcattctcaccaggtgcctgagattcttcttcgagttaaggcttcgaggacaggatgttcatagatgttatctacaaaggataacacattctaagccatttttggtgaacaacttggtttaaataagtgaatcaaatcagattagctagatacttattttatagcagaggaccacaagacccaaattggtagggaaagcaggttgagaaagaccttgaagagctctggtgagaaaaatcgagtgggaggaggtggagggggaatggcttgtctgtagctggggctccgtaagaattctgggtcccgaataacatgttttcttagatgaagagcaataggagtgggcttgtactaaaaataacccaaacaaagctgtaggctacctatataagtagattctcttaggactatgtatcatgcagtaaagccttggcttatgtggacaatgagaagcaatcccgaaggtgatctgggtttcaaaacataagagcaacatggaaaacttcagaatgtttagcgaagagcattgatgatgattaaaggcttgtaaaattgaacctatgaggataagttgaaagacttgggatcgtttagcttcaagaagaggagactgaaaaatgacttaataacagactcaaaattatgagagttattaagctatgtatggtgaccagctgttttgtttctggcaaggtcagagaaagaataggtttcaaatgaattaggttagatttaaagaagaacttcttgactataagaattgttaaatagtacaggttgctgaaggatgagggcttgaatggagggcttttcaaataccttccattttagtgattctctgtgtgtttataaagtgcaacaaagtgccacctttctgctttcaaaatcaaaggcatgatttctgttttccattataattctgaagctcagactcgcagaggtttgtggacataaataatgagggtaatttgtcttgactctgtggccattagaatctttaattgagaaaaatatgaccaaaaagagaaacagatctgccatatgatcaaaaaattgttactgataatcagaataggtgcattattaattttggactgagggggataatgttttattgttagaaaaacccacgttcatttgatttgtatattccagatagaaaaggtagggggctttatgaaattgattcatttttgtctgttcctccctatggggagaaattaaaaacatttccaggtgacaccaaagttcgtataacctggagcttgagtgatgcaatccaaaaatcaacctcaaggaatttattgtcacagggaaggaaacagagaggaaataggcaggatttatttctgaaaacagaaaccttcatgcatttaaagactggcagagaagtgaagttgagcagagcaagtctgagaaaggctggctgaacacaccattcctttcagctttggagctggagctgcaggaaagaaagagccctgttttcagggttaacttttcttggagaagccaagcatcagagtttgtatttttaagtttattttttaattcattcttttgcttattaaatacctgtctgagcaacttttgtaataattaattagtacacctgcacatggtttgctttaagcactcactgatagctcattgatgaaacgatgagaaacaaagcatgtacacacacacacagacacacacatgcacacgagcacagtgttttagatgagttcttgttttgaactaagtgcatacaattttctctaagggaaaaaaataatcaagagaccaaagaaacagacttcgaaacaggtgacacaacaaggaagaaggctgagtgggtgtggtgccaggctaggggaaaggaaaaatactcagaaagcctatttttctttcctcccaaaataacttgggctccatggctcattaagaacatttagacccttagccactacactttacccttccaaagcaccatcactggtggagaaccacccacagttgaagatgggtcagaagtcacaacttgctttcttccactgccctcctttcttcattgtccatgacattttcttagtggtccttggcacttctgatgtccttcttatgatttttacatttgggtctcccccacccctccccccaagatgatttattttcaaacctcttctaaagatttgtaaaagctacagctgtctcttcatgggaaaagccaacctaaaggggattagtggccctccttttttgctgtgaggccacaggattgatagtgggaaggaaaatcagctggagagaggtttggtttcctcctgttgtttatctttataaaaaagaacgctcttctcaaacacgttgctataggaaaggtctcttcattacctatgtggggacagtggagggccagttccatattttctgcagtaactgaggctggctctgttttcctgaggaataagctgtgaaactgaggatatactaggttatctgaagcaacagaacacccactggtatacccacaaaaagtgtttgattatctgttctcccctgaggactttacttaagacttataaaccagtctccctttccttaagaggtactgtgatagagacagagtgagagctttcagtggtcagggctttctagaaggctggacacatggccatgataatgcctaaagcacaatcaagaaggatggaggcttttatgaaggtcttgagattcaaagggaacaaaagtggatggtttggagagtgtgtcagtgaaggtcctgtgctttgatcatgtctcaggagattccccacattgactctctttgggtatttatgaaagtctacattgttggcacagatctgatatagcaaggaaatttgctggggccagggatccaagagtttttggattgtataattaggaaagcactgatggtccaaaacgcaggatgaacattcattttattttttacagaacatatttttgtcccctttctgtatattatatattggttctatattttgtgagacctggtgcagcagttccttggtagagccaaatagcctgaatgaagagaaggagagatgcctcttcctttgctttcattctagattgtgttggagctatgctgaggatggtgaatagagaaactgattgtagttaatttgtcacctcgtagcccagtggtagcatttgaatggaagtaagttaatggaaaaggactttgcaagacataccagccccaaccactcattcttgctgagggtcaacccactgtcagatataggtggagaagcccttctgtggtatggaggcaccatttctttattctcttgttaggaaaactgaaatataaataaataaaaatttgcaactgaattggaaaaaatctgacactgaaggatgaaatgtagctttcgtagcatgagatttgtggcacaaactgaccagaggaaggaaatctgatgatctagatagatgcctttggttattaccacttttgctaaatgcctctctgctaagaactcaacaggatgagtcatctcttagctgtaaacaaaaacttttatggggaagggagaaatccttgtgtttgaaggaataggtggcatttccggctaatttataaatgtctcctttcattcctttctaaattgggacaaattgctccaaaaagtctatcagaagattatgtatgtatgtaggtatttatctatgtatgtgtgtgtgtatgtacttttgttacagcaatgaggtcctccagctgaaccatagctgagttctattcctacttctattcctggtgctatttggtcagttcttagaatggattttgatagttttcacttcaggaaaacacagtctcaggccgggcatgctggctcatgcctgtaatcccagtactttgggaggctgaggcaggtggatcacttgaggtcaggagttcgagaccagccttgccaacatagtgaaaccccgtctctactaaaaatataaaaatttgctgggcatggtggcaggcgactgtagtcccaactacttaggaggttgaggcaggagaatcgcttgaacctgggaggtggaggctgcagtgagccgagatcgtgccattgcactccagcctgggcgacagtgagactttgggaagaaaaaaaagaaaagaaaacatagtctcaccgttctcctccacataaatgtggccaggctgttggaaagctcgtggtttagaaattatttaaaacaactgcgttagaaaatattatttgtacaatagcatcttaaatcccaagacctctatacaacttacaaagtaactgtagaaattcagggaaattcttcttttttaagttttatttcatttttaattgacaaataattatattccagtaaaattctaatgttgatatttagatgcttttgttcttggtgagcttggtaattaaaagaaggtaattttaggaaagaaaatcagctttaataacgtatccatattgtttatttctacgttaattgagcaaacatttgcaccatggctgctctgtccagggcttttgagaatgctaagtgctgctgaaataactttgagagtctaacttgaaagggcctccagcagaattgagtataaacccgagattagcacccgtaaaggtccataaagggcttaatttgtagtccttttatttatctttagcacagtgtgaagtgtgatggactagggtggaaggtgaaggagcaaggtaaagagagactcccgtgacaatcagcaatacgcctttaagttcattgggctttgcttatctttactaagccatcttttcttcttagagaaactgcaattattattggtcacaagaaatgaatattctcatgtaccttacaggatttgtttatcctgttagtctttaatagcattgtagataaatgccctgccattgtagagaggtaatcatacttttagtttttgataatttagattatgtggaaaaaattctgttttggtgaaaatacgacattgttaggactagtaacaaaagcatatatatgatgctcagtgctgccaattatttctttttacatttgaaataacatttacttaatttaattagtatacaggaagatctgttgtaaacatttcagaaaattcagaaagcattgaaaaaaaggtaaaaagtcatttgaaactcaacaccaaagataatctcagttaatattttgacataattccttttactactttttcctaaatgtatttgtatgtatgaatatatattcacatatactttttattttatacatttttgcattttctaaactgattttattttttaattattcaaaggaattgactgacctataccctgagtcttaatcgcaaaatggtaaatcctgttcgattaaaaatgaacattttgaaaattgatttacaaaaattggtataaaatctattcctttaaaaacattacagcccactgcattattttctgatatggttgcctgcctcagaagacaactcatatgaagtgtacattcttctccttgcttttcttcttgtctcttttttccttttatctctgttctgttttataggtgctcacaagatgtttggtatgctaatcgaataagaatatgctatgttgggcactctaagcatgctttgagggtctcttgggtttcctcttcagacttcctcaaggctccatctctttatgtcatcttttggagtggcttatgtataccttagcaaaggatgctcagacctgccctatgggctgggttttcagaaaataatatattctgtatttgcatagcatacaaagtttgtaataacattgatgacttcacaacaactctgtaaagcagacagagaagatgccctttttcaagtgataaagaaggctggagaaattagagaacttgcccaggatcacacatctgtgttgaacatttcatatttgaaattggttagtatgattcaaatcaaattcaagttgaaaaaaggttcctgctgtgaatttgaagaaaaatgtgtaagatgtcactattttaccacatccaaaataatttcagattactctaactagaagctagccaatttttatatgcatttttttgggaggagggggcaaaagtaagtaggaatcagatacatgtgaagaaaaaaaaattcaaatcaattttgggggttacatagttgtagtttttgttctgaattgctctggtggaggatcaaagaaaagcagaattaatggagaaaaagagatatgtagaaaaaaagaaaacattgcctttttagtgtagcagcttgttcattactaaggatggaagggaaaggtaatgcttaacctttcccaacagaagaaggctgcaagtcagggcagggatggctgaatcagcaggtaaggtagttcttttttcctcctggaccatctccataggagatagggtgactggagaagggaaggtggaaggaagatcccatgtcagacaatgctttttcctatttttggaattctagaaacatgaaagatgagaggatgtagatttgaagactctaaaaatcctgaaaagtataacattttcagttcataagtatatctggaaaagaagaagcattcttcttggcacatgctttgccttaagctactaaaagtctacctgaaaatgcaatttgaattattattattttttattcaacgcttgtaaaaactaaagcagcctttctagtgtgacttttgacatcaaggaggctaagtgaagtagagaaaagtaggagactaggttggggaggctggcccatagaacaaagtagaagaaataagccagggcaatggcagcttggctgatgagagcctgggactgagtggaaaaacatagaggcccagtcagccattgtggttaaaagctttgtgaaaagtgtgcagaggtggctctaaaatgcatttgtctggttaatatgacaaggaagctcacaggcatatgaaggtttaacaggcaatgaaggctctctgacagtctatatgggatctaatcaaatgcaatgataaattctgggataggattttttttttttttttgacagagtttcactcttgttgcctagcctggaggctggagtgcaatggcgcgatctcagctcactgcagcctccgcctcctgggttcaagagattctcctgcctcagcctcctgagtagctgggattacaggtgcctgccaccatgcctggctaatttttgtatttttagtagggacggggtttccccatgttggtcaggctggtctcaaactcccgacctcaggtgatccacccacctcagcctcccaaagtgctgggattacaggcatgagccaccgtgcccggcttggggtaggaaattaaaaacaaaaacagtgccaacttttaggcaatgaagagtatttgttaagcatcttacattcttgatgaaactacctagagtctgtgtttcacttttgtaacattgagaaatcagatagaaatattgggttactaaggaatcagctgtgacaattttgataaactatacatttattccgtgtcaccaatgtgttaactggcaaatacattatgatctccttcagtttctaatcctttttgccaagtaaataaattaaatcaacaataaaattttgattatttttcctctctggtataagacatttcagtaaaaatatatgaaaaataaactgcgaatggaatcttccagttagctgaatggacctttcaaggttcatatattcattctacataaaactcatatgtaataatctgtggcaggagggaaaaagtggctctaagtatgatctggaaacatacagaacctcttgactccttcaaattcctgaggtgctcttttgttaatgtctctggtttcagagggcaaatgttatggatgcaaaacctcaaggtccacaatctgtcctcttggaaaaaacttgccaacagaaatgcgtagctgtattctctgtttctaaaacctgacagtaacctgaagctttgagccacttgccttcttccttcccctctcctgattaatttccttttccctgtgtgtatgtgacattaagcagcccttatttctgtctggatttcttgacatcccatattctctctttagtctcaacccttactcttctttcagttgaatttactttagcttgggttcttgccataaagaaccccagagcttgacatgtttatagttatttgtacacattcttatggtcacatacatcatgatcttccattttcagtatcaaaaaccgtattcccacagagcagagatataacagttaattttctttgtaaaaatcatagaattacctaaaaataactgaatatacttgaattgctgaatatacttgaaattctgatcctgcttttctctacgttgctcacatcaaccaggcagccacagtatttactgagcacctgctgtgtgcctacaagtatgccagctacacacaagtttggaatataaggcacaaagttttactttggaagaattaaaatatggtcctggagatagtgctataattaataaacaattagatggcactgtgtattcaattcggctatcacatgttcattctttcaacaagtgtttattgagccctgccatatgacagacattcttctatgtgttaggaatatagcctttaacaaaatgtacaaaattgtttccctcttggaacttgtgttctattgaaagagggagacaataagcaaacaaatgaatatatataatatgcaaatatgcagatagtgataagtactttaaagaaaaaagaaccagggtaaggggacagagggagggaggtggatgatttttcatgtaggtcagtcaggccttgctgatggggcaacatttgagcggaggcttgaattaaatagggagcgagccatctatcaatatctaggtagcagaatgtcaagagcaaaggcattgaggcccagctctttggcatggttatgggatagcaagcaggccagtgtggctgcagcagagtgagtgaatgggaaagtggtatgacatgaggccacagagatagttgggggcagagaatggtgcgtggaaggcacagatcaagtaggagctagaccatgagttggccttcaggctctaggtcaaatctggtgtggtatttaaagtcataggactggaataaataattttagatagagaagagggccaaggacagatccctgggggtaattctcaacattggaaatagggattaggaagaggagccaatgtgggaccctgagtaggtacaaccagtgagataggaagagtcccaaagaatgtggtattcaggcagcaaaggactctgttcaagaagaatgtcaccaactgtgtcaaattttgctgaccaaggactgtcattgagtttggcggtgtggaaggcattgatgatcttggcaaaaaagatgtcagtgcaaggatagattcaaaagatcatttgttgaaaattaagagaaatggaggctaggaggtgagtacaatgaatttagaaagtgaacacactttcaggatgtttaaagggagcagggaaatggggcagtaaccggaaggggatatggcataatggagctcttgtgctgaactgttaagaacgagtgacccttgagctgggtttggtggcatgcacctgtagtcccatctacttgggaggctgaggcaggaggatcacttgaggccaggagttcgaggctgtcatgtgctatgattgcacttgttaatagccactgcactccagcctgggcagtatagcaagaccccaactcttaaaaaaaaaagagtgagtgacccttgacaaaccactttgtctctcagagccttggcatcttcagcagaaaaatagaaatataataacacctacctataatggttattttagaggatagtgtatagtaaaattttgtcatttgtaaaatgcaacataaatgtaaaagtcatactatccttagcgtgtaatagaaattttgaaagaaagacaagatcacttggaggaaattaggtcctgaagaaaatggttatgatggattaggtggactgaaggcatgtgttacaggcacagggaagggaaagaccagggaatgtgaagaagtaagaacagctggtttggaacagaggatgaatgttggggagaagaggaaaatcacattgaataggtagaatcaggctaatgatgcagggctgtaaaagctattcagaaaagtctcagttaatggagcaggcagtagggtggcctcatgaactccccaacaagatagttgaagggagggctttggattgccacctgacagggaattacagggactggatccattctacctctgtccacagaagtgctccagtgttgtgaagcaacagagatattttgatttggtggggaaaacaagaggaaccaaatatacggaagacgtagaagggaagggatgtatagaggcaaagaagccagctggaaaagtactcgcacaaccccagtgtgatgagacccaggaaatatatatgccatttaaagtcagtatcaacatcatggagaaggaaagtgcaaaaggaaggaatgtcttaagatggggaaacactcatgaaatgagtctgaagtcaatcgacaagaatattaagcacctactatgtaccattgctgttcttggcactagtctgggcactcttctaagctctgttctaagcatggactacaaacatgcttaagggcaggaaatgtgtgggaggaagccaaatagtgatagaatgaggcttactattttttttttttgttttttgagggattaggtccattagattttgtatttcttcggtgcctactacataatttgctaagtgaattaatgatttttattaaatgaattatcgatattaattggttgctgcaacttttttttaaatgtgatttgacaatataaattactagctttaaaaatgttcccagggcagctgtggctagaacacatgaccagatttggcttgtccagctgctaaagaattctgtcaaatataagccccccagccattcgtgtgaccctcatacaaacaaataataaaaaagacattcagataaataaagcaaaatgtacagagaaaccctgattaaaaataaagagagaaaaaagaggttccattcctgacagtctgctttaaggaaattgccttaaatacatgaaaggatttagaatcaatgaggtgcactgcagttatttatatccatatgttaagcaacccatgtttctacttctaattcagtgaaagtgctgcttggatcctttccagggaaataagaagggggcggcattggtactccaccgtttactcaacattaagctgatggggtatgacagttctgctattgcttctcattgacatcgatagtcttataggtcttatgtgtatctgtgggagggatgtataagaagaccacagaacattgtacctggagatttaggtgagaataaacagatacatgaataaatgagctctcaaactggctgaaaacaaaccttaagcatgaaataatgtgcttactaatttctgaactgtagttttgaataattcgtcagggctaggactctggttttaatgatttgtgtggtgacaatatgccactattcacaatagagtttttaaaacagtatatttgtaattgatgttgttaaaatgacggacttgggtttgggttttaaagcacatgttcagtggttaagattaatttctagcaatggttttggaggttgaaatcaaagtgtgtacaaaagtaaacagttccctttcagagcaaataatttgaacttgaatgaaacttaagcaagtgagcatcaattgcaagttaattttgacatggatgtctggaaggcatcatcaattaccacagtgagtcgtagtgtagtattgtccctctgtgctcatgtgagtaaaggaacaagttgcttgtctaaccccagagttctgctggctgggcagaacctgaggctgaagttgtccccatctggccctatgtgaaggatgcatacagtggcacaggcacctttacagaccagcagccacttgggtatctgacctgaaaggagcacatcgcaggcagtttctctttctaccaaatattgatcaatgacttttaaaaagaaggagtctttaccaaatggtttagttcctgggtcacttttctttttggtcttgtaagcacaggaaataaaatacatgctgatactttccaatggaaataaaatgcataccattactctccaacagaaataaaatctttccatacagaaacaagaggaaaagtctgtacaaggaggcatttatatcatcctcaggcatattaaaaacagaatgaattgactaagacatcaaatattaaagtaatgttataaggtggaccatatgctaaatagactgccattaaggcattttaggtgaccttattattccaaaacaaggagatattttctttctagctggggagaaaaattctttccaactttagtctttatttcatttggtgtatgctggtttttttccttttgtcttgccagtagaactaaaactgatggattttctcagtgtaagtatgataatgtaaagcaaagaaatctatacagcgatactcaaatttgtttaaatgctttttttaaaaaaatgaattctccctccttttatttttgttccctttttctttcagtttacttttccctggaaagaatagggtatctcagtttattcattattctgggtcagctttgagacagtacagtgagggatttgcatccagatctttactttgtcttggaaatacacatattaatggaaatgtttctatcttcattaatttgtgagataagactaatttgacaatgagttggactcattgtggactgtgtttgaaattagaaaaatgttcacaacatcagccgggcacggtggctcacgcctgtaatcccagcacattgggaggctgaggcaggtgaatcacgaggtcaggagatcgagaccatcctggttaacacagtgaaaccccgtccctactaaaaatacaaaaaattagccaggcgtggtggcaggtgcctgtagtcccagctactcaggaggctgaggcaggagaatggcgtgaacccgggaggtggagcttgcagtgagccgagatcacgcccctgcattccagcctgggcgacagagcgagactccgtctaaaaaaaaaaaaaaatgtttacaacatcagagacagtttggctcctaagtgatcatttattggttctctgtgtatcagggactgtgtcttttcacccttatgtgcaaggtcccagcccagtatctgtcaggtagtagttaacagtaaagttttcaaatgaataagtgaactgttaattgattgctaaacccaagacatttataccctaaatataaacttttttttttctttttagtgatgatgggctagaatgatgacatgagaataatgtaaagtgaaatacaagtcctttacttctttttgataagtgtcagcattctaaaactctatctacagcggcccttgggttgcatgagctgcttcaaaccagatttttctatctgttgctttactctctacagagctggaaaaaccagcttaggtcaatgtccgagcattatccaaaactcactttcttacagaaaacaaaggaatttcctctttcagaatctgtatatgattgagcagctaggtagcctgttcattcacttttctcattttaccctaatgaatattttcctatcagtcacatcagaagctgtcattttcataaccataggtatttaactgtgccttggtaggatttaagctttttaaagttgtctggacaaaccctctggtgggtgtgaatcacaatatctcttgatgcacagtgggattgtggcagctgcttaagtgtctggaacatttatctatcatatggccagttcactgctttcaaacacaaggaaactctgggagtggtgctgattcttgagtatatacaagatttgccatcttttgagccttataagaaaaaatgtttataagctggggaaatactttagaatttatatgtgactctttcttttgtctctgccatggttccttataaatcactcggtggctcagggagagcagtatgcttctgaaataaggttacctgctttttgatgtatttataagccttggccaatccatccatttcttgtaggcattccatagatactctgaaaactccaagttcctgttataatcccagaggatctttcagagacattgctcagcaagatcatctaagggcagtgaaatggaaatatgacaactcttatttcatccttctgaaatattaatccttcatggttaattatatgatattttgagggtgttctgcctggataataaatattattggtcaagagtcctattctcaaaggactctaattttagtactatgcataccttatataataaatattaatatttaattaatctgaacaagtataaacttttcagttaattaaaaagtggccttgtctagttgatatggtcatatggtcatatgatgttttagaaatttgccttctggtctgtatctgtaggaacttgatgaaaactacttaatttttctgtttttatttttatttttttctttttggttttttttttttagacaagatctcatttcaattgcccaggctggagttcagaagtacaattttggctcactgaagcctctaggctcaggtgattctcccacctcagcctcttgagtagctgggactacaggcacataccaccacgcctggctaatttttttttttttttgtatctttagtggagacagggtttcaccatgttgcccaggctggtttcgaactgctggacgcaagcaatacacccaccttggcctctcaaatttctgggattataggcgtgagcgactgtaccccgccctacttcttttttctatgccttagttccatgcctgctaaattgcagcagtagctctaatcttgagatgttaagaaaactaaaaataggccgagtgcagtggctcatgcctgtaatcccagcactttgggaagccgaggcgggcggatcacttgaggcggggagttcgagaccaacctggccaacatggtgaaatcctatctctactaaaaatacaaaaaaattagccgagtgtggtgggcgcctgtaatcctagctactcaggaggctgaggcaggagaatcgcttgaaccagggaggctgaggttgcagtgagccgagatcccgccattgcactccagcctgggcaacaagagtgaaactccgtcttaaaaaaaaaaagaaaactaaaaataataactaatattataaagtatttacgataaccctctgaggtactagtgtgatttcaatttaaatgtgaagaaaaaaatggggagaagttaggtagtgtgcccaagtcctcaaacccagtgacctgcagagtcaggactggaatccagcatcaacatccaagcctgagcccttgccaggctacaatacagctcccagtctggttgtgtgatgatctttcaggtctccaagaagggtggccaggatggcattgacatctcttcacaggtggccttggtgagagaccttccagtattctaatgctgtgtagtttttagtaggattccagtaggagtacgtaatttatcttttcccctctttctgtctcctggagagataaatcctatttccattaaacagatttttgttaggaatgcttcatttcttaaccagtgtaatttgtatgcctgagtagctcatcatagaaccttagagttgtaacaaaggctgctttgattcagttcatttattcgacagataagaaactgacaaacaattcctgcaatgctttaatatttatttggtcagattgtgctaaaacatccctttcctttcttactcttttgagatgatattttatttttcttgctcctaaccaccaaacttctggaaagagtcacttagacttgtcgccttcatttcctcattgcctactcacgctgagcctcctgcagtctggcttctgctcccacggcttgactgttgtcttgaaggttgcttagccatggtccatgccttactctggccgactttcagtcctcatgatccttggcctctttgcaggtataatcctgttggtgaccccttctgcctccatccttggtctcttccatatcatattctaattttctcctgcctgtatgactggtcctctttctcttttgctttatcttttatttatttatttatttacttttattttttgagacgaagtctccctctgtcgctcaggctggagtgcagtggcgtgatctcagctgactgcaacctctgcctcccgggttcaagcgattcacctacctcagcctcccaagtaactgggactacagacgcacaccaccacacctggctaatttgtgtatttttagtagaggtggggtttcactatgttggccaggctggtctcgaactcctgacctcaagtgatccacctgcttcggcctcccaaagtgttgggattataggcatgaaacactgcaccaggcctgctttatcttttagaaccgccacccccaccgcccccagccactcatctacctcctacaagtggacaaatggacattgccaaaagttctgacttggctttcctttcttcctgtttccttgcttgctcatcaaagacactatcatgtgagcagtcaccttgacttaatgaacaactcccaaatctttatctttcattctagccgtcttcaatgtcccatctcccttatgcctaaaactaatgccacaaaatccttttgatctttaaataatatatctctgtaaaaactaacctttccttaccttaatatagggaattgtagtgattaccaattattcttctagctaccagcctctttctccttaaagttcttttcatgcagtgctgtaactcagttttcctcgatctcagctttgatcatgtcaacctgaggccttcatgttgtgaaactctctgtggtgccccacatgctactcaaccaagtacaggcttctcaggctgtttccctatgcccagaataacttagcccagtcttatcattacaactgcagtcactttcttacacacattttagccccgtacttctcaaatgtattagggccaacacctcctttttgtaacgaatactcaataatctctctttactatcctcaatgaaatctgtagattttctaaatatatccacacaatttctgaaagatcactctgatgccattaccatagtataaaagaaaaataaaggaacctaatttaaaacaaaattatattcatatattttaatatctaaatacttagagaacatgctagaaaacacaatgaactagccagcttcttgaacatgtgtaaaaccaccttgaatatgacagctacaaatcaagattgatgcaggtgcatattagtaactcaaacactaagaatgatgttactgttagcgaagattttctgaaatgtagagcaactcttgttgaagctcctaatgaaacaaaatatgctttgtctttggtttctagatggttttattcctagaaaacccaatgtgttaaaactttagggaaaaaaatccctttatatttaagtagaactaggttctaggctcaggtaattataaccagattttttttcacctacttgaatgtctggtgtatgtcccaaaagtcatgaggaatgtggaaaaacttttcattctgtaggactgtcccattgcaggacaactggcatcattagcctatgcccaccagattacagctgcacacccccaatcatgtaacaatcaaaactgcctccacatatttcccaaactcccaaggagtttgtactacctgagctgagaaccactgctttagccaaactgctctcactgttggtgaacatgccttgccttttcccaattgcacatctcttttcatgtggcaccttttgatttgaatatatttctttcatttctgccttttgaaattttatctctttagcttgaatggcatacaccccattaaattttccttcagtctaaaattttgcagcatccagatgtggcacttagaattcttaaaacatactgcttcatgttagttatttgtgtacagctattacctaccagcttgtaaggtccttggggatatagaccctttatgttatttacatgttataagaggttatattccccagtgtttctattaatagcaaagtgtcttgcacatagtaggtgcccagtgaatgtttatcgggtaaatgaatggttaattttaaaagaatatttgtaaagaaaaaagaaaaggttggtttttattttaacatttaaaacttacttttgtttttataacatttacattttatcctcatgtcataaacttctaatagtacaaaataatatcagaaaagcacatagcctataggcctatggtttggtctgtacacatacttatgaatatgtgtccactggaattattattaaagataagatcattctctacacatagcaagaaccagcattcaaacactgtagagaaaatacggagaaagtgcttctttttcattcaattctgaaatgtacagatcaaatcaacttgtgaagtcaattgggatgcctgtacaatttccctgttttctccctttattcaaaaacctcaaaaccactatgggtaattccctcaagatctccttctaacacatagagtctaaagagtaagcgagatttccaagaactgaaagctttcaacttttttgagtatccctctccaatgacatgagctaggaaagcccagtgctcactccacccacctttcatctctaactagaggagcatcaagcatttgtgcagtctttcctgccatggcttcattttctgtcatcttaactccgtcacgaaccctcagcctcctaacaatatccatatgaaagaaatcagacccctttgacaatgaaaaacacatttaagctactgcacacactatcgccactggaaaagtagatattttttctgccaatccaactgcagtactctggcaatgtgtagttttcatggttgtgttttcatttattaaataattagtcgaaccataggtgctaatcaacaaaagttcgttactatttacaagaagaaacttaacagctctttgtttataattttttctgaagtaggaagtatttgtctttgaatgtagagaccatgtaaagtgatccaagaaaatgatatggccaaatgacatgattaattttcattactttctttccatctcttgcctcagatgcatttgagcctcgcccagagcccagcttgatagaaaaatgccagacttgggttgaatcagtcaattaaaaaccagctcttcttgtagtttgagagacacaatggagtataaagatgtactctgccttcaaggattttacgtagaactgggaagttaagcatctgccagaggagattacaaagaagtgtatgataaatgtcacatgagtgatacagacaagagtaccacagatttgggggatgagatcactgtggaccctgatactcagaaaaagcaacctggcctccatgtgagtccaagattgtcttttgatcagattgtcctttctttggtaccggaaatacttctcctggtctctatgaggttttcccttgggactcagaaactgtgcctttttgtagcaccatgattgggcattaaaatgtctcactaacaggcctgtttccccttgtaatatatttctctgaagacatgcctcaaactcttgtagctcttatacttgttagctcaagactctggcgagtcctgtggcttttgtgagggcaaaaaagtttccatagaaattaaactgattcattttaacccatttcctctaccactctgtcccagagaaattggcttagactttgtggattcaaggccccaaatttgagatttgacaaaagcttacataataatggcattgtgggaataataacggtatagcttttcagttttgctagttagagccaagatgatagaaagccaacccaggagccatcttgggacgtggacacttgggggttgggaatgggggtggaaaattactactgcattttttcccattctttttagcaaaggtgcctcaacttttaaatttgataaagtgatttccactcattgatgtcaccagatttgttacattaaaaagtaggtccagaacaaataagttcctggttgtaaggagtgtgtatgacttcctaacaaagtgctagcgtttgggagatatttatggatataagtcagggaatcatcctctttctaagttcctgaaaagcagggtgttttgtgcatattttttcctgtgcatgtagaactcaagtggtacctacatccctcgccccagacattttctttctttctttttttttttttttgagatggagtctcgctgtgtcgcccaggctggagtgtggtggcgcgatctcggctcactgcaagctccgcctcccaggttcatgccattctcctgcctcagcctccccagcagctgggactacaggcgcccaccaccacgcccagctaattttttgtatttttaatagagatggggtttcaccttgttagccaggatggtcttgatctcctgacctcgtcctcctcggcctcccaaagtgctgggattacaggcgtgagccaccgctgcccggccaacattttcaaagctatttaaataggataatcatgaagacagtgtcctattattccatcaaaatcggaagttaggtattgtctattaatggttaatttctcagatttaccttccttttctctattaagcgctgagtttttcctttgaagggcatatagtagaggctggtcttttttctttgatagagccctgtttttgttttactgttttaaccagtatactattaaagttaaactttgatactgcttatgctttaagaaaataaatctgatgaatgaaggtaagtgggttcttggttcttcttttttttaatttaagaaaattaactgaagcttgtttgatagtaattctcatgcacgactaggccattttttaattgtttctgtttttaagaaatttcaagatttttagtttattttttatctaaatagtcccctggattgttaaaaacaaaatagccttagtgctgcctggtgcaaaaactagatgtaaaggtattactggaaaggaaagtgagcagagggctttctctacccaataagtaagcagacatcagaaacggatagcaaaagtgagaaacaaaatttaagtctgggtgtcaggaacaaaggcaaagtttcagtcagatgtatatgatgttggaattacattcccctctcccccagaaagaacatccttaggttttctcccattctgccaaatattccctcctaggctttcgatatgttctgcaggccacacacacaggagcggggctgtctgtcactgaacccagatgcccagctgtggaagatattctttcagcagcatccgtctgtttcttggcaggacttttaggcagtctaaagaaaacagtcccggagcagcctttgggcctgccttgtggttaatactgtgctggcttgtatctggttcctgctctgaccctgtggcctggacactgctttccttatagtctttgtctctgtctctctcttttaaagagtattcgtgattttggttcgatttagtgaaacacccgtggacatctagagaaactgtaattttttttgcttgtttctgtattgattcaaagagaggtgggtgggtattagaaagcaaagatcttatgggaggaaaagggtatctttctgcaatgggccaagtatgttggcaaaataaaagcctgttttcaccagttcattttcaagctcaataatctttagtcgtctgaaagggagaaccagttcatttcatacccagctagtgtaataaaattgagattcaggggcaacctggtgtgagttagcatattttgttcttaagggaatattcttaggcttaaagggtggtcttctttgaaagaactatttaatagttgtattccttggtttaaatctttatttatacagcatttgtgttgttcagcctttgcgctgaagggattttattttcctattctcttgattattttaaggttagcagttgaatgttgctagaatttacacaagggagtggttccccacaccccccagctccaccctcccccattcctcccacctgccaattgtgtctgaagtaatttcccagcagtgctgttgactttgggagatgtagtatttccagttcgtgtgtatgtgcgcgtgtatgtgtgtttgtgtgtatgtttgccttaatatctaactgataataagttgttacttaacttggaagatggacacatctctctccttttctttgacccactctgagaattaacatgtggtactcaaaggtgggggagcggtggcggcggtgttgccttatgcttgacgacaggtgctaatcttcaaggaaatttaccttacattccacccattaagggtatggtacataaaaatggcttaatgtctctttgaaggtgtcagcaggcatgtgtggaccacacagaatgggtttcactgaaagtaatagagtgaaattgtctgcataattattttcgttggattgagaatcagcagccctctttgggttcaggaaataaacctctgttaaaaccatatggcactattctcagaagagatgttattacagggccacttccctctgaaattttgagtcaggagttcttgaaaggagtcacatatgtgggaatgaatgtcaagttttcttcctcggtcatagttgtgaaagttagatgttttctttccgttttcacaaatgccaccatggtcaccaggtcctggaaagaagcaggctcagctgccgcagcaccgccacttcaggtgtaaatgtctgaattattatctgcgccaaatgattttgtctttaaaagaaaagaaaaattgcccttaatccagtgaaatatgatttgtcaaccctgaaaacacatcttaaggtcaggttaattgcattctgtctgtccaaacccttagtgcagatttagttggcttttctgttttctttttttttttttccctttgcccagcatcaggggctataaaactttctctgaactaatttgtcacagtgctattgtgccctagagataggtatagtagagtaaaaggtaaagtgaataaaagtttagtttgtataatggctagggaatatttgggaataaactaagttaggaaaagatattaaacaatggccaccatatttttatgttttatatatgtgtgtgtgtgtgtgtgtgtgtgtgtgtgtgtatttcagtagacaatacaatgtgtgcattgtgagaaatcattgtggattttatctttttttttgagaggagtgggcagtcttcctggttagtctttgctgtagaagaaatataaacaaaccatcgatgtttgttcacatctgttaataagcctgggatcttatcagagtctgtagagtttagtctggctgttggtaatgctggggagttgaaatgtccctttgagcatcagactctcggggagtacttaatagatgttgagtccagcttttcatttcttatcctagaggaagaaggcaaaataatctatgactgtgaatggttgagatggctttttctattgccttatttgtttttgtagtgagagctgcttttattaagtagaatggttgctagcacatagaacctttggtcactgaatcacactctgaattcaataatttatttattcaacaaacacttactgggtacctaccataggcactttaagaaagggctgtgggaattcagagatgatgactgagttctgacccatctctggcccatcacatgggctagaaagaagcttaatctccgggtgtggtggcacgtgcctgtaatcccagctactgaggaggctgaggcaggagagtcgcttgaacctgggaggtggaggctgcaatgagccaagattgcaccactgcactccagcctgggcgacagagtaagactccatcttaaaaaaaaaaaaaaaaaagaagcttaatctgttttaggagataagacatgggtattaataactatgattatgtgacagaaagtgatagaacatgagaaagggcataagaaagtggcaactggagtgacatggaagttcagaaacatttttacttctatttgagggtggaggggaggttttattgaagtcaaggcgtttgagctgaatcttgaagattagaaattagacttattggcagaaattcttggttataaaattctaggtagatagatgatgacttttaggagactaacactatatgtctttcactgtcttatccctggctccatgtgcaggtatactgatggaaggtatggcatggagatataatatcacatgccttagtgctttagcttaggtggttccttccacctcagtggtgatctgctctattaatctagggcctattcaacattcagagctaattttaaatgccactttctctagtattttaacaattctgtcattttttagttctgtatttattgatctcccctactagagctgtaccactacaatatgataacgttttgcacattctagatattcaactgatatgattcagttgaacaaagtagatcaggtatctgaattagtcttttaaatacatattgaagtttgttttcagattagtgttaaggaataacaatttatacggtgaactggtacataaaattatagccctagggcctgatcttgaaatactagaaaataagcccattacaaaacgatgataatcatgttttttcaagggacattctaaattgttctagattttagcaacctctggtgttctgttttttatagggaaaagtaagaggtccaaaaatcttcaggccaacttggtggctcagactttctttctcaagcccttttatatgtgtttattagttaagtttgcagctctataaatgatatcatttgtactagttgcattggatccctgccatttctccatccataacagatggattctgttcttccattccactatacgttgctcagggtttgttactttctgatagacaacagaaatgagaatgcagaaatgggatggaaaagagggagtgagtctgttttattttgtttccatatttctcctaagcttactggagtggcaaatggtaggataagtggtcagctatactgccccatgagattcaaggagcctttggggaggaaggaccttgctcagaagataggctggggaggatggttaattttggagatttttgttgttgcttcatgttttcttttgatttccctcatctttgatgctgactctgatgttggctttccctatataatatttggacgagaacaaattttgcctactctctggcctgtgcaagtgacacatacagagccattgtctgacttgtgacttggcccagaaagggctgattgtcatgcagttgggagggcttttagactgggtaaaaaattctcccatttgtttaaaataacatgactaagattgaactcagaagacactgtgcatgcatttcttttcaaattagtgttaagaaataaaagtttatactgcgacctggtatataaaattatagaccagtctagggctccattttgaaatattagaaaataatacatctttgtataagaatacctctaatagtatttagacatttttcccttctaaatctatctttccctttaaataatgaatatcattagaggtattcttatgcaaggatgtacaggaagcatttagaaatatgaatctgaagcttggtagaaactggaaatgcattttccatagtcataggaacttgaagccattgggattgatgaggctgcatgaggaatgggtatggaatgaatgaaggagagttatcctttttaccattgtgacctaactttgtgtcccttgcctggacacagacaaaggttctcttgctaagctcccctgggtccctgaagcagcagaagagcagattcagaaccgtttcagtggccactgcatgggttgtctccgccactggctcctcatctttctctttcctagatcactttttgtgttcctcttccttgcctagccaccctaggagtgtttgcttctcagggttcccttttagacacttttctccactcgttctgtacccattccctgagtgtcctcattgacactattaacttcgtgttcccatgaccactgaaaatgcatcttcagtctcttctgaacttcagactggtatttctaggttgcttcctgggtgtctgcacctgaatatgtcccatgggtacttcaaactcatggccaacacagcgttagggattccccacctctacttcaaccaaacttctctgcccaaacatgaacctcctccagttttaccagttttgagtgccctacagttcacccaggtgaccaaaccagaaacctgagactcaccttctctgccttacttctgacatctaattattccactgtactgttgtctgtacctctattctatgtctcacattcactccctcaaatcttttagtgctgatttagcttagtatactctctcagtgtttatcttctgacttataacgtaaaaacaatttcctaactggttttatgtctctaactgcactcccttctaaatctatcttcccctgtaagtaaagcaatcttcctaaactgtaaaccaatgcatggcacacccttgcttaaaatacttcagtgtctccctgttatttgcaggatgaagttcagacttggtggcacactgacaaggcccttcagcatctgctctgcccaactgccttccacccacacacctgtggctgagctccagcgatgccaaattgcttcactctatactttctcatctcggtgtctttgcacctgctgttccttctggttggaatgttatcttcttctgcatttgcttgactaaattctactcattctttaagtctactcaaacgctgtctcctctgggagcccttcctgactgctcttgaaagtcaagtatttaatctttggctcctctttggtttccttttcatactttaattatattatttatcacactgctgtaattatttgtttttatgatgcctccagtataccgtgagcaccctagtttagcatagttcatgaaacataataatgcttaggatattttaattgataagtgaagattacatttgcatagtggttttacctgtgtaggacattttcacctcttattacattttgtcctgacgacatccctgtgttgtagatactttgtttttttctgacagatgaggaagttgagtcataggaggaaattgaatcatagagatgatagatatttgcctacagcctcacaactaacttagtagcagagctaggaatagactcccaagttttcctgctccttgtatagtcaggcccagaattagaaatgagattctcctttttaatcagacactgccttggtcttttaactattccattaagttcactaattgtgtgtaaatgtgtgtgtgtgtgtgtgtgtgtgtatttgtggaactcatagtgacaggtgaggaatccatagctttattgattcttaggattgcaaattaggtcacctgttattttacagatgagaaaattctgtacctgagaagttcacacttgctattagtagcagaacccatgtctcctttcagtcacatgttctctttcatactgcattttgggcagtcatcaattccataggacagactttttttttcttttcttttcttttctttttattttaagatggagtctctctgtcgcccaggctggagtgcagtggcaccatctcggctcactgcaacctccacctcctgggttcaagctgttctcctgcctcagcctccagagtagctgagattaaggtgcacgcaataggacagactttctgtgttgaattgcaagggttgttagtaggatttgttgagacattaggcaagttaaatcttgagaagagcccatcctctgagcagaaagaatgccattcctgagaacattctcaatgaaaggtccatgaaagagataggacccagaagagaaagaattaaatgataatattctttcagggattatcccattcttccagattgcattacttcttttccagtgagcttcataggttcttcggtatgtatcattttgaactaaaatgaaggcatctaattaggctgaaggatgagaacttcctattgcaaagaaaggtacgtttctattgcaaagaaaggtatgcttgtgatcagaagtgtttgtgatgtcatggggcagagtataaagcatgtggggccttgagaggacggtatccctaattacctggatagagacatggaactaatgttagtagtaacgctgttcctctggctggattattcctctctgtacacataggtatgcatataatagagataatataaatttataaccacatatatgtacgtatatgtggaaaagggaatatatttcatatggaccaaagaaaaacattttgccaaactgtcattattgattaaataattcagcatgaagccagcaggcagatatccacaaaacttaacactacacttgcttttgaaaaacaaaaaaaggttttaaatgtaatcgctcgaaggatgttttttaatattaacccacaccaacctgcttcctttggcttgagaataatacactttaaaaaaatctgttgtgccttgaaaagaagagtaaaacttgctatcttctaactccatttaacactacatttgattcctttttatataacgataacttgatcctactcaaaatacttggcacctttagtgacagagtggcatgtaagaacactttaacagatttgaatgtgagtaaactccagtagttctgaaatgaagaggtagagttttcagttccttattcagagttcacagaagataagaatactgggattaacacaatagactccccttcattacacctggctgaataaagcaattatctgtctatcaagactagcaacttgtgcaacagcattaagaaagagtggatggataggtggataaacgctattccattggaaagcggtgctgatatatgaggtaatcctttgagtttaacttgtaaaaacagttttattttggagtttatatcatgttactcttgcagcttagagagaaatgatttttcaaaatattgttgactgcatttttcagttctttacccatctgaattttattaggggggttatttcaaagacgtctcttgtttaatcatgtttaaacaatctgtttaagacctgttgtgtagatataaacacaatagtcctttaatgtcgtaaaacagacttctgacagacatagcacgtaacagacatgcatccattattgcttaagctgctgttccttccatgcctgacctgagagggtaaccacagagctcagctgaaagcgttcactggttagaagacactgacatgtgcctatgcactgtattaatgtctagcaagcagagaattgcagagcagcatacaattgaaaaggtcttagactagattaaaactaagtaccttaaatctgttttaatggctgtgtttacatctccttcttcttcattcctttaaaaaaagtaatcaggttttgcaggcgttaagaaaaccacctcttcttgccagctggactaggtccagtttaagcaagaaattctccgcctccttttttctgtctttttcttttttcttcctctgtgatcttctctgccattcagcacagcaagaccaggctgtgggagttggctgactttttctttggttattactttttaacattttcttcctgttacagaaatgagaaaattgagaatgatgttctgctgctgcagcagtgaatgtcaagagaggagccctttgcctttttaattacatctgtgtagtgtttctttttgcttaaaacactctgtctctctgtttctctgtctctgtctctgtctcactctctgtctcacataaaatatgcacaaaaccttaataatgaaagagaaatagaaaggatcgcatgctaaggaaattgagccaggatccaggaattgcgtgacagtctgtttgtaggctagttgtcactgcactctttgaagaataatgccatccatgtttagctggattggcaaataaacagtgatgctttttgttcaactacgaaaactgctatttccattgctaaaaatgttaccgctaaaaaaatctttgcatctctcagtggggtctctataagtgctcgaaacacaaagaactgtggtatgtgtgaacatgttacagaaaaagaaggcaaagaaaatgtttttggaactaaaacactcaagttttactaagttttggaagtaaagtgtagacatagagaaagagtttttttgttcatttcccataaagtcaagggagagataaagattcacatggtccaggatggtgtgaatgttcagttgtaattagtaggagaacaagtgataaaacggagtcagagagactgggcataatgtaataacatctttgaagtaagcttctgcactttttcttaatgtctccttctggtctctttgctccacgttttcttctttccctcagtggcagcctggtataggaaaaaggaggctcaggcagtttaggggactgcctcccagtgtcactgcctagttccatgactttaaagctagtctcagtatttttctgggcattaattatttctctaaaatgaagaacccagtctgatgaaatctatattctcttacaactctgaaaaatcctaattcatataattttactttgaattggagtaaggagggatggaagcatcccttggaaacaacaggcagacaaatttgagtagtaggtctgaaatgagaaaataccagtagagttgtaataaagaagcatagtaggttagaggtgtattaggacatgggagaggagctacggcgaagttagccggattcccggttagctctttttttcctgcctgcaaaaagtattacttctcatcttgtatatttccatgatgctttcatccaatctttttaaaaaattttttaatccttttttgcttcctacctcctatgaagtttctttttcttcagacgtctcaagtttttttagtccattatctgaagaaaagggattatactgtaagcacgtgtttattataatttatttcctgaagtttgactgatattggcgtagcctgataactgtcctttctcccagacactgtatgctttgattgttgtgattcgccacagcctaaaacctaaaagttataaaggaacttgcatttatagacattcaaattaacattgtacaattcttttatttatttatgaatttattcaaagatctcgaattcttcaatccttagaagcctaaattttgaaaggagcaggccttcacttctctctcacacacatctaattgtatttaaatatgactacatatgagattgagatagtgaactttatgtcactggtctaaatgggtgccttttagtattaaaagaaatcaaactcagcttttaacattttttctatgaaatggagtccctagaatatttctatggagtctatggtttaaccatgtaattatgtctcttgagtagattatatttttcttcccataattatgtttcacccaagagactggaaaggctttagacctgtcttgggtgaaattgttcttcctctcttctctcttgataaacgccgaatcttacgtgcctgactctgtttaagagctgaaaggggactcttgaagatatgtggtagtgattatgatttttttcctttagaaattggtttatgtattaagaagggcccttagagagaagctctgttagctcatttttgaaatgccatcagagaagaatcttctggaagcagatttgtttatgatctgtggtcctgtgtctgaagccacacactaacattgttctagggctgtctctactcacgagctatcctgtatcatattgcatggctattaatttccagcggctcaaagggctagaggccttaaacatgaagacagtttcttagcccatttcattattctagtccagaaatagtttctgacctgaatcagacagtgcactcttagggaaaaagatgacgcagcagcctttcccagcaaagattatagactcatcaattttactgtgggaaatgtttcccaataaccagctttttttttttctgtcttctttgtctttactggacaaaagtacagataattttaaatttatccatgttcttattttttaattcagcaatcatttgttgtgtgacttctctgtacctaggctccaagtttgtgctagacataaaatgtgacacccatccttaaggggctctcagtcaagtctaggaaaatctaaaatattagggtttgaaattttgtataaatattttatgtcaattcatagtaagtgaatgcttactggatgcctactgcacataagcataaccacatgtagtagacaaaacatagttgtcgctgctgtcagcttgctgggatataaatcagagggatcatcaaggctctcgagacaggaaacaccagaacaatgtgatgaccaagttgagcttggaagggattttgccaaacggagttgatgcggagagggtgttccaagtggaggggacagcttgagcaaaggcacagggtgtatttggactgtcgatagaccagtgtgagtagagcacaagctgggagcagtacagttgtagccattggaaatgagagtgacaacgcatattgcgaccatattttccaggtccttatttgctgggctcagggggctctatttaattcaatagacaatggaagacaattgaaaggttttgagcaggtaagtgacatgaatgttaggatttgggggcagaaagaatttcagaaattatggaaactaactcttcattttttggtagacgaggaagctaagaccaacagggttccattttggtgcccttccaaatatgccaggctgctactctgttgtattagccacaggccagaggttaggagggttctagtggaggcccattcctgaagaaactgtagaaatgggctggagtggatgatgggggtctaggaaaggaggtgacaaagatatgcctaagctggattttgagtctgagagactagaaaatgatgatgatgaaaataaggaaatcagaagagaagctggttgggatggtttgaggaggaagggaggggcaaagggcttaattaaacattacaagagtataggtctttgattcctagacattcacaaaccaccagtgaaatgtagtcatctgaacgtaaacagaggagcagactttcacttttctccgtagtatcttcatttttacatgtatgtaggaatgcagaaaatcaaagtttttaaatttagagcctcaatagttataataaagtatgtggatgagaactttgcgtggctttcctaagaatgtacttgagtctgggtaatcttccttgtgctattgcttttgctggaaaccatcgactgaactccctaagatacagtaaggctcatccttagaagtagaaatgcaacaattacatgtggaatgcaatcgtgactttaaaattagtcaacctgttccctaacgcttccctacaaacacactccttcatgtagcacttttaggatagattagaagtgaaggatctcattatttttttccaaaactgctgtggaatagcagctctgtggacatataaccaattttctctgagaaatagtaattctgatgcaagtcctctcctctcttcctttttactccagggatcattgtcacaacattctgaaactgttacatcctgtggcttgagccctagagtattggaccagactttattcaatcacatacttggtgacagcaaaattagctcatgtctccccagttacccctctcttccagtgaagtctgaatgcatggtggatgaggctcatggactgccaaagtatggttttattcattaagagagctgtctttttcctttcttttctttctttctttttttttttttttcttttttgagacggagttttgcacttgttgcccagtttctcacttgttgcagtggcttgatctcagctcaccgcaacctctgcctcctgtgttcaagcgattctcctgcctcagcctcccgagtagctgggattacaggcatgtgccatcacgcctggctaatttcatatttttagtagaaacggggtttctcaatgttggtcaggctggtctcgaactcccgacctcaggtgatctgctcgcctcggcctcccaaagtgttgggattacaggtgtgagccactgtgcctggctgagagctgtctttaaagggcagattcccataggtactgcatagcttagaagaattaatgtatagtagtaagactagagttataaagtggtttgaagaatggtgtgcgtctgtttagattgatatcacacacatatatagataagcgtatatatatgtgtgcatggatatgtatgtgtgtgtgtgtgtgtgtgtgtgtatatatatatatatatatacacatatttagcatcatcttatctcacaagatatttattatcaggttttcatcatttttcttccagctaactttccttgtttcttctctgcttatcaaaatcctagtcaaccttcaaggacaggcatcatgattttgtcagtgaggtttcctctttccccttagtcaaaatcaattgctcccctgcacttcctataatacttcaatactttttaaattttttattatgaaaaatttcaaacataaaaataaagattatattgaatacaatactatctacccatcaccttttatttattttttggcatatttcctcacctactattttgcccaaatattgtaaagcaaatactggttgccatgatatttaacccctaactatatgttagcccttctgaataagaaggacatttttctacataatcacagaaagtaccacttccttaatatttaaaaacagttcatattcagattttctcaattgatccgcaatcatggcattttagtgattgccctcaccacagcctctcttcagttatatttaattgctttcttccccactagactgtgaactccttgagggcaaggatattatcttatatatttttctatcctctcctcctcacaatacctagtgaggcttgcatgtagtagataaccagtacacattagctgcactaactgacccaaatatggacatggtactgcttccttattgatgctctattacagatcttcttttaaactttattttatttaaaaattatgttttcatgatacttaggatacaggtaaatacctagggaatttttaaaatcaagttaaaatactactccaaaaagatgagctgccaaacatcatgccctagtgatcagcaaaatgattctgctgtgccatattagggtagactgggcatcacatggcacactcttcatgaaaagtgccttgttttttgtaagtgcattttgacattcttcagggtgcgctgactggtgcagtgcatcaggttgtggatataatacagagaatgtaagtttctggctggggagccacgtagctctccgaagttgttaaatgtttctcaatcaactttcataaaaatgggcaaaatgggtcacatcacacagagtcaagtttactttcatagttcacagaccacattttcagagtcttcgtgtgccagtttcagatgtgtgatttttgaaagcagaagttataatggtagtattactaactttcattgtgggtagggcacaatggggtgattcgctagactatggcttagggacttaactgtttctcatttgtctttgctctaaggatgtgtgaatgctgtgaccttttgattatgctttcttcttgtgcccctgaatttattgcaacaaaagtcatattcagctaaacacactcaactttttgaaagaaatcttttctggaaaccacttttttgtttttaattttaaattgatttttgatcatgatttcccctgaatgactgctgctgaactattatgagctgaaataagctggttggcaatgggagagaaaacagccccaggccagcaatcaggaaaactgagtctggtcctgccactaactatatgactttaggtaaggcatgtcccctctcagggactcagggtcctcatccataaaagaagcatgttactctaaactttagagtctaaatgatttctattgccctttcatctctctgattcccagtgactttcaacaatgcttaagaattacagtgaaagtgaatagggttttccagaaagaaagcaaatttttacttaaatgaatgtccttcagtaaaattttgtaggaagcaccagtaagggcttatctctagagaaaggttttgcccactagattcactagattgtcaaacaagaagaacttttttggggaaagaatatgatatatataatatgatgtcctggaccagaaaattttctttcactcaaggaatttatctaaaagaggagaatattcattcattcacttattgcataaatatttactgagcacccactctgtagcaggcactgaactaggttgtgagattatagctgtaaacaagacagagggctcattctcatgagacttacagtcttacaggagagacaaaaataaatacacaagataattatagattgtggtgactgccataaagaaaataaagagagggtgtgttcaagagggtgggaacctattttggttatgggaggcagacaaggcctctcataggaggtggtgttcattctgaggtctaaggggtaagaaagagtgggccctacaaggaatcaggggagagcacttcaggaatatggaaagctcttgagatgggaaactgaaaaggagacagattttcagctgcccagagagaaatgctagagtcttaggccaaggttatatcagtagaaatggagagaactgaatcgatttgagatatagcattcagaaagaaatggcaggactcggtaatggattgaatgtggagagtgagagataaggagaaatcaaggaaaatgtctaggcttttggcttaggaaactgagtggctagtgtcatttactgagatgggggactattagagagaaataggatttttttggaggggagaataaaaaattctgttttgaatatactgcatttaagatgcctttgggacatcccagggtagatgtcaagtaggcagtagaacacacaaacctggaactcaagacagaggtcagggctcaaccagaaaagggggagtcattgctataaataggtagtatttagtgcatgagactgagatcaccttgggcagtggttctcaatcctggctgcagattggatcatgtggtgaaatcttgaataaaagagaccttttccccaggtcccactatcagaaattctgatttaattgatctgatatggggcctggacatccatgtttcaaagctccctagggaattttcttattcagcaatgatggaaggattcagggagaagttcagctagagaagggatccaggactgagcatttttacatagagtctcaagtataatacaggaattttccattcttcataccctcctcctgtttggaacatctactcgttggcccgttggatgaggtttagtcctcactgcactatgacagagtaccctatccttgacttagtcagtgtgtccttggtcttccatgttcttaatttctgaaggaattgcttgggtgctggggatttaagtacaccttctttcagcccatcattcgagtgttaccctgatgtggtttagtggtaacaggtatttgtcatagttgaaatgtgaagaacttgtttggcttttgctcttcaatgtactttgttcttcaatgtacttcatacattatgaagagtgcattttgttgtggttgcagtggtgtctgtgaaggggcagatatctacaaagaaaaatgcgtatgtttttgtatgtgtgcatctgcagataaatgtttcctgaattattctagggtgcctgtagatacttggaagtgttctttgaagataatttccaaaagatcatgaagggttttaaaatttcacctgctttaaaatttttcacacttaccagtcctagcctaagtcctttatttttgcctgcaaactcttattactcctgaaaacgctgggctaagagaaagtaaaaatgtactcacacatgtacagtctgagctcacatctcatacagcctctaggaaaacctaatgaaaaggctatagaaagcagaggcaaagcttattaaattttcttgtgacccatggcccacgtaaagtcctagtgtataaaggaaccatgcaagatcatgtagccctcccctcagccctcagggaacctgccattccaaaaatatggcctattaagaaaaataacttccagggacaattccgtaagctttcttgttaatgtttacagctgtatcaacaccacaccaatactatgtgtgtgcatgtgtgtgtctgtgtgtgagtgtgaggaacagactccatggatctgtgacaagtactatataattccctaattgtgaaactagttagacccagcaagatgtattgatggaagtttggtgagttaggctacagccatttgtttagggtaatgggtgaattattaactttgtaattgaatccttgttgctacttctgcttatgttgaaagccagccttggcacctcactgggcttagttcttaggtgtttcactctatatgatctggatattttcagtcctccatagcagctggaagaggaagggaagagaaagctagaataccagcactgatggtgccacgtgatgaatggaaagctcagtcaacttggacgagggctatatcctcgtgaaggctcagctagtcggcagccgaggaccataagctagttgttctacctctgcaggcctcagtcacttcataggtgaacaccttacttgccagggtctaggagttgttttgggtcatctctaaaagtcctctagggatctaaaatctatttgtaatctggatacaaaacagtaatggtggggaaaacaaccattaacaatgaatttctctaatttttcctgttcatttttctcctaggtctagtccttctgttatagcagatgcccaaaaacttgcactggcaggaaatagggtggtgggtgcatttcagttaatgggcctagttggaacacgtttggccgtggagacagctacactcatattaccaagccttggcttcctatctgttttctttgggctgggaaggcaatgaaaaaggagacaggaaaatacattttggggcaaataaaataaggaatttgtcttacgaagacagcttatagttgggaaattctaatgttcaatttaaccctatcctgatacattcctcttgttctgtattaagtggaagctaaggcgtttgcgctacccatagagtagtgaaaaactcccaggcttgaaggcttttcataaaccttcttcaaggtttctttcttttatggataatattctaattcccttagtttctcttcaaggggcaaactcttaatcccatcatcatcttggtggttcttcctcgaatcagcttcagttacttaatagtcatactaaaatgttagggcagcaccctagggcctcactggcacagaatctggaggaaggaatccccagtccatttctgtttctctattagcattgcatttgtccccaatagcaccaccctatagatttactctactgtggtacacccagattcagatgcttttctgttatacttgcaccaagacactagtatgtcttttgttaagaatgatttgatgatttttaagaagtcttagtatcttggtttgttttaatttgtgcatttctctaatacccagaatttctttagcttttagacttgaataaactagaagagagatagaaaggctccccccctccgccaaataatggattgtcacagtcacatgtttacttaaagagtgtatttcagcttcttttccaaaaccacagtagtggatttaaaataaaaaagcattctctctgatttaacagagtttattatacacattccagctttggcatatcacaaaatatccagattcctcttgagaatttgagtttccctgcttacatttctgtttttttatttcttaaaggggtttaggtttgagttttaattttccagaaaagagtcttagtaaagagtagttgtaacgttaaagaaaagtcactatggtcatcgtggaaatttccctttgacaaatgtgtttgtccgtgtctctgctccagctttgtgacattgtggctaacatgcacggactctctgaactttcagaggggatttcctccatcatgaaacaagcaaacacccccaatacacatctctcctgtttgtttttttttttttttttttttttactgagagggccagagaaggtgtctagtatcctgcctctctattgatgcttgacttcaagttgtcctctgagacctcagctctccatttataaaacagagctaggaatgctggccaccagataccgcttataaagcaatttgaaatggaaggcattatgtagacaagtcattataaatattaatattgataattccttggcttaaactcccagtttgtatgttcacatatctatttagcatggtcaattgttcagctaattaatatgcttttattttatgatttgctatttccagggcacagacagaagcttgatgactctaaacctagtttgttctctgaccgcctcagtgatttagggcgcattcctcatcccagtatgagagtaggtgtcccgcctcagaacccacggccctccctgaactctgcaccaagtccttttaatccacaaggacagagtcagattacaggtaagacagactcataggtttcacttgcatagacgctggcaggctgggggtgaggggctaccagaggagatgtgttcacttcaaaactcctggagctgtgaagcggcttattattaaagaatcaagacttgaagacactgatttcttcttttttattaaaaaaaataacattcaataacttggggataacattttgggggatatttctactaatgctctactctgcagcaatctcagtctacaccctggtggaacggtaataatgcactttgggagaatgtttattatacgtttctatattgtatccaggtggtgcaggggataacatcacacccttactattagaaaattagtgttaccctctcagatttgggcttacatttcttacatgtataactatttcattaagtctgcttgaaaattgcccagggcgaacaggaagccttgattggtagttataaggcaaggtcaatgtgtggctcatcgggcacacagaattcacttctgatttacatttagctctggttctccattagacatttctctttataaattctagtcagctacttactttacctttcttctgagaaattaacatcggcattacattacagactaatcattcacatttggtgcattaagacccccaactcttttctttttgtcccacttgtgcaaaaacagatttatttaaagactcgtttgaatgcttttaggtcatgatgacaagagagtgtattaattattataaatctttaatttgcagataaaagtattgagagctgaaaggaagtttacatgtcatctaattgctatcattggtagaggtggactagaatagagggaaagtaagtcaaaacaaaatgtgtaataagccctcaacatggatcttttttatggttagatttttgtttatagtagttaggctcgaatgttcttaatggtctcaaaacataattgtttataagcagaatgacctatctcttcttctctcctgcccatattatgtaaatgtattcttggatagttacttagagtaggtttcagtttctgtgagtgtatatattttagtcggaatgtatgagtttgcatgagtgtatattttaaaaaataatatagaattataaaaatcaaacatctaaacactaaagataaccagatatctgcattaaggaagaacattattgctctttgaagaatggccatgttttagactatataaaactttaatcattcatatgtggggttgaaaggtcaatgtgttcactagacatatgtccttgataaaaatacaagagtaaaattcacactaacttgtgaatttgaagcttgtagctatgggtgctgctgcatttaaagtagtggacttagagactacaaaagatgggagagtgggggggcggtggtgagggttgaaaaatgacccttgagtacaatgattgctgtttgggttatgggtgcactaaaagcccagacttcacctctatgcactatatgcatataagaaatccatacttataccccctaaatatatgtaaaaaaaaaagtagtagactttagattattcattaaggcataaaatagctttccttttgtctttatagtaatccttagactgtgtgtgtgtgtgtgtgtgtgtgtgtttgtagaagcaaatgtatatatatacacacatatatatgtgtttatatatgatttgtaatggatttatgatgactaataaaatatatataaatatatgttccatgatttggcaaccactggctttttaaatgtttgatttctgtattctgatcattatttgtttgctatttatgctgttaatgactaatgctttagaaatggcctttggagactgcgtgttgccagattcacttaagaagatgcttctctcaaggctttgtccttaaatctaaagatgagatcataaagtagatccagaggacattttagaacctaaaggtaccttagatattgtgaaaccaatggctggaaaaattgtgaagaggatctgtgttttagtagcatccccgcctagcagatacacgtgcagagagtgaggctcagaggaggtgtggggctcacctgtgccacaaatgcatctgagcagatcgagagtgtggccacctccacaggcctggccctcctccagttgtcagcttctcttcaccctcttccctgttagggggctcaggaagttaagcttcttgtctgcagttgcacagcaagttactggcagggcagggaacacattcactggatatatttctgaaaatgaaaatataaaacaagttaatttctaggtactgatagcttcttggaatttttatgagtattagtgctcttcattttgggattatagtagtaatagaattgatttatagactagtgttctttttttttcaacatccactaggtattggacccaacaacttttctcaaactttccaaatttccagatgtccacatacatacttgtcaccccaaccactcttggccatgtgagctttctttaaatgttcccatattgtgagtgagagaatgcctgtatctgtccataaccaaggagatgcagtgttctactgtgacccaatttttaaaggaaagcccaggaacatctggagcagcagcaatgcgaaaatgaattgaataggttcaattttttaatctctggattgacttctttgtttattcaataagtatgatttggggcctatcacatgtagcaaactgggtgttaggtaatatggagagagaagaaaagcgctgttcttagttgtagttgaagagatagttatcctccccagccctggcataccacatcctgtgccccaactgtaataccattcctgagtacacgtgcttctctctgtacccctttactcagccagcccatctacagtagtctctgtctgctgacaagattccacccatcctccaaggccactgtgttatcttcttcaggaaaaagttctggaaccttcatccaaaggcagttcatccaccctctaagctttagttaagattgccttcttttaaggatactgtgtattcatcttttctaccctgctacattgtacattctttgagggatttattacagggatttattttcttttgtgactagcccagtggcagtgtctcattaaatatgaattattgaaagttcaggtgagaagcaatcggtgcaataagggttgagaggatatcatatctgtcttagtagcattaactcttctttctaatttcctgtcccaggatgtcattgttccctagtgatgggcagcagcttaaatcacatttcaataaaacatttacttagttaaactgttcggttttattcaagtttagggtcaatgtaattgcatgactaaatttaaattcttgcctgtaatggattttgtaacttctttgcaatatgccatatctgcattttagttcatgtaatcctttggacaagacgtttgtaacaggaagggcccagtttcctctctgcaattggcttgctactcttgatatctcaagcttttaccccaaaactgtagataatgatcatggttatatagtcccctctagttctcccacttgccaacataaaaggcagaagacgtctttaaactcccagaagagtgaagtgaaattagcaatcataaattgaggaagtcataagcatttagtgtttcatagttagccttttccagtgtctcttgcagttcctaggaccaaaacttctagccatgtggtagctagaacctaattaaagtggtttccacataacttcagtctgattctgtattccctccctggtatctttgcagtgcttgtctgatggtgatattttgtggaagtctttaatggctgatgttcagctgaaggcccagggcctccccacagcttcctggggaagttgcttcctctagacctcttatcattcagacatctgctgcttgtctctaggtgccaggaaacacctagtctgtcacaaatgttcacttcttttgattcagaaagcggcgatagcaatagagtaaggatatgatgttgggagatatcgcttaagatatctttaaactcattatcctctagatgggtccgctacacctaaaaaataatgctgattcaggcccttgggtttggtggattgggacattcatctcgcttttagggtgggggatgtactgctattctgtttttcactcattcaaaaaatacttaatgagtgcgtattatctgctaggcattgatgcaagtgagtgagagagacacagcttctgctcacaaggagcttatattttagtgtcagacacagtcaataaataggtaaataagcatacatataagataatgtctgataataatgaatgctatgagaaaatgaaataggataattgctaggtaacaactcggagagggaaggagctaattttgattggaaagttgagaaaaggtcctttgaaaagctttgaagatctgtgaggaatgacatttcaggcagtaggaaactcatgcaaagcctagattatggggagtcttgggggccacaatagtggcttgggtttagttctgattgtagtgggctaccagtgtagtgggggatgtgaagcaagggaatgacattatgtcatttacatgcataataaaacctgtttggatgctgtttgaggggaccataaggggctaaacaaagaagcagaattatgttcaggaagctgctacagtagctcgagagagtaaatggtggtagcagtggaggtggaaggacactgaaggattctgaatactctcttttttttaatagagagttcacaactctcgctgatggtgaagggaaaacaggacttcagagttttgacctgggcaattggaggatggtggtgccattcactgatgtggggaagactcagggaggataaggtggagtggggctggggagctcagagaagcagttgggtggagaaaagaagatactaagaaagaagagactcgacattctcactcctacagtagcttgtaaaactgcctttgcagacacccaaggggcttcccttctcatgattcttcctaggttgcagcgttccctttcatgatttcctttctcttttaaaagcagctcttggttcttttgagtcttggttgtttttctaagcagtcaatgaaagttgattttccctgcatgtaaatgctggaaggaagtgcacaggatatttttttccttggttcagacccctatttgcccttcactcaggagtagattctggacacttctgcataggctgctagatagtccatcatgttatttattgtgactttttctccttttgtaatgtacaagcaattcatttgaagtttcacttatttttttattttaaattaatatgttattgtatttcatgcttttttctctgcctagacactcttccttgtcttgtttttccaaacacatttttattgtttcttcaaaactcagatcaaatgctgccacctctgtcaagcctcttccaacctatccaagcagagtcgaatcaggctcccgtgccaccttgtacaacccttgattatatcttgttccatgtgctgatgattactgttcacatgtctgtctcctccatcagactttggacttttcaaagtctagggccatgttttcttcatctttgtgtcccccattgtcttacacggtacctgcttactacgtgacttttggttcggtgatcagtgaataaatggggtcactgacctcttcaggaggcgggacccactattatcctagccttaatatttttctagtgtctgtttgattgaattactattagttaccatttattaaatgcttgtcatgtgtcaggcattgttctaattagtttaactcatacgttcctcacaatagctctatgagataggaggcattcttatggaaactgatggtagacaggtggaataactcacccaaggtcccacttactactagtaagtggtaaatacaggaagtaaaggcagctctccatagctccatggccctgtgtacttaccaccaagtactcttgggaagctgaaaggtacttttatcatggctcagcttcctcccatttctgtacctcactttcatttattcagttctttaccatttacaaaccaaaggcctaaaacaattctaaaggtacatatttcacagatggaagaaattgattcttggagaaatgacttgctgaaggctacttcagctattgcagttgactgtgagttcctgattcttagcaagcactcaccttcatccctatcaagataggttgggcttgttgccaacaatctaagtgacatgtgtcctgcaggactaatttctttttcttctgtccattatacattatttaggatacttagagagaatattttcatgaacgggagttagcattaggaatatctgaattatactttaaaattcaatataatcatttaaatgattaaattccagttatataaggcatgtatttaaggtaaaaactgcttgccagacatcctgtctaataataatcttatcagcagttactgtgactgaagtggtttccacctaacttcagtctgattctgtattccctcagcaaacagaactcctttaaaaattaaggggacctcagccaattaggccagctggaattaggctgtgtatatgtttggctgtcctaggattctagtgcttgtcccgaaacatttactagtgtaatcctttcagaaatcagaaagcacagctgagttgcatgtgtcttaagttactgttctgttcaagtgctgagtgaccacatgattctttaatgtgaaacaagttgggagatgaagtgggcctggggtgatgttggctgtgagtgtgagggtggatggacccataagaggctcagatactgttggtgagcaggaagaatgacagtagggtaccatcagtgtgggtatggaggagagtgggagtcaagtgaattctcagacttcacagtcactgtggtcctgctcacttgtaggcaacttgtgtcaaggaactgaagtcactgcattgaaagacagattgttggaagtggttcttttttactttggtggtgcagtgttgtaatttctgaagttcctgggaagttttgccctgtcttcttcctttgagatgtttcaggtggggcagctgggcaaatttgctgctgccttgcacatgtgtgagcagggaatctgtacaggaggttgctagtcacaatccttatttttagaaagggctcaaatcctgtgtgtaaacactatttcatactgattctgctctggtggccacattatgaggaagagtagactttaggtgcagcctgtgctggctttaaagaatgaagcttcctaggactctgtgaagggctggtggtcaacccgttatgttgttgcttagcctgttagcagtatccacagatgagcttcttaaaggtgctctgtttggatttctgtctgttggcattcccttattaactgaagatggtctgactttagtacgctttcagaaaagtagagagggtgatgttcccagaaaaattatttttttgtttcaaaaaattgtctttgtaattttctcctatctgggaatataagatgcatagttaacacttagttgtgataagaagggttcatctcctatataatgcctcattttatccttcttcccccaaaacagttccatttctagcctgtctttaactctccatgcagaggaagtcttgattttgttctcctattcttttccaacacatcatctttctcttttagttttatatttagttttagttttatatacatatgtatatgtacgtatatatgtacacccacgtgtatgcatacctgtcccctttattagttgcttagggtccttttttgccctgttttaccttttgtgatggactatgggcaaaaggatcagaataggagattaatgttgaaggaaatattaacttatggggtaacccagcagaggggcaagttaggcctgcgctttgtgcaaagatgccctggtggtatattttcacactaaataatggatatgcttcacatatccattatttatgtgatatgcttccacatatctcagggcttcacacagagagttggtgtacattgactgtgcagtattaatagcaacaataatatattatagatatgatcagtctaaaaagtgttttcattttaatgtatgcgaaagtattccaggaatataactgtatggcactactcccagttagaggcatcagattctctttagggctttgtttattgtaataaagacttgctttttaatggcttaaaacaattggttttaatagactttaaaagacaagatttaacggaagaatcagattgtgatccatatagagaatatgaaaactgaggtgctaggagatttctgaaatcctcagagctgaaattggaaatctgtgtcttaggaaggtgaaacctgacagatagttttaggtggggagtgggtgaaggtgtagggggaaagatttagaatgaaaaatgtttggcgctgttgccagggtgaatggtgggaatggaaaatgactttggatgagcatctttgaggacccagctgaaggtagaggtcatgggaagagccaattggcatgattatgtgattctctcccacagtggttacagtttgtgactaggagtgggctaggctgtcgtggaccgtctgtctgctaggactaggtaggattcagtacaacacaggggaacaaggaagatgttgagccagtttcccatgtgggggaatgtcctgcaggttggtagatggaagaacttccaaagaggacttgacccatctggactgggaaaatgagcagcagctgagtggaagggttaagagggaaatttaacggggaaatccgtgtgttcgttcaggtgggaaggggaaggagtgtcatctggagaggttgaaggtagatgggcgctcttagccattcttcagctattcctcatgtgaccgatagaggtcccacaccttgtcctgtcttctccagtgctctagcctgatgctgcctcttgagaacacaatccgctagctatgcctgaccaggtcagtaggggtctactaatattctgttaatatatcccaagtttgtgttaactttttgttatcccatcacactgtggctgtcagtccatgaaaaactctgctcttggagcaggctcccccatcctgtcttgtagttgacaaaatgcagcactgtacttttgctcttatttcatttcatcatgttgctttcacctcctctttccatcctgtagggttattttgtagttctgattcttcttctgttgtgttgggttattcctcacaactttgtctcatcttgaagcttggaaaggtcccttctaatccttcaagactttggtgaagatgctggacagaaataagactattgtgccctggattatgccaccatataactctgtctaaactgaccacaatctatatattaatgaccactttctggcaggctttttaactagctataaatcacttagagataaggcatatatcttgctgaggtccagatatgcaatagacagatgagctgccttctaatctattgctttagtaattctaggagacagttttttagtgagcccattctgctttctgatagtcactgtgggatgaagtgtgagaagttctttgcacactggctattgaaagtgtttttagtgggctgcaagcaagtcaacaccaacagtggctccaaaacaacttagtttcagcaacttagattttaccaatagcaatgctgttttcagaataagataaatggaataagggaatgtaaaacctagtgtattttgtgtcgtaaactttaaaggcattatcttcaagtaatttaacagctgtcatgtggagtagtaatcccagagagcaaaactaagattagtagtgattggagttatagggaggcatattttacttaatctaaggaaaaactttttagaccctgctccatcaagaagcagccccttgagtactagttacctacatttttgccatgttgtgggatgtcatttatcttggagcagagacttgaattcatctaaagcagcacactgctctcccttatctcctcacttctcttgggccttaatttcctcttatgcacgtttgttctgctctttctatgtaagatcatcctttttgatagggaagattaaatcaaaatagggttcggtaattttcctttctaactttcattaataaaaattatgcctattgttcttgaactttggcacataatcacatcacctggggagcttgttaaacatacagatgcccaggttctaccgctgaattagaaggtgtgaggtggagccggcccaaatcactcccagctgtaggcccaaggcaggcctattactcaaggctcaccttacccatccagaactcatcctgatccagcctgaggccatctcaggagcctcgcccccgtgatcagctgatgtgtggaggcagctaagagcccgaagcctgagtgcagcccctggactccacccctgtgtccattccagctgttgttttctctccacaccctttcctgcacgcctggtcctagactggacttctgccctgtttcttttaggatgctgccagagggagattttaaaaatgcatgtctgattatgtcactctatacctaaacatcttctaaggtgacctattgcatttaggataaagattaaaatgtctagcatggcccagcagggtcagcacagcctggctcctccctgcctgctctccattctcatctcacaatattttgaaactttttcacaatgttctaaacacaggccttctatcaagtacataaaaaaatgatattgccttcttcccaggaactggacacgggcctaaagccctcttaacctcccttactcatcttctagacttatgcttgtcattcaggtcttggcttgatctttactaccttagagaagctttccctgatgctcaatgtggttggagttcccattttatggtaccatgaacatctctttttcagcatttaccatagttatatgattatttgattaatgcctgtctctcctacccaactgtaaaactccatgggaccagggattaggtcataaaactccatagcaccagggattaggtctatttttattcaacattaatattccaagtgcctacacaataccagagtagatacctgatacatatttttttgaatgaatgaatgagagacaattactagaacgatggatataatcatccatgtgacatcaggtatcaccatgcctggggaccttctgtaataccccgactgcccatatctgatttcctggatgttgacatcagcctgatttgaacctgaatttaccacacccagttcaatactatgattcgaactaagggccactctcccttgccagcatcacatctcagtggcatttcaagttcttgtcccacccttttgtatctcatttctctccctcttctagctttgccgttgagattcaggatatgccaaggctgagaggccaggacaggtatgacatgtggtatagcctctttcttcttctattagatttttttaaaacaagaaatgcctgtccttttctgtaagacagttatgatccctatctagcaaaagttggtgatacataagagtgcttctcatcaccttgtcttaacaatgcaacttccttctggtttttcttttaacattttattacaggatatgatatcttaggccatacatatcgtttttcattctcttctctgcttattgtcttctaagtttactaattctctcttctcccattgtttgtgttgtaatataacctatggtcatgcctggtgtaccctacatagcctccagttttaaccagtttgctgcttttttttctcagatttcatttttagactctgtcactcgggtctgtctcctgctggatgattctggtagccaccagatcagttggagaaggcccttggtggggacaaggggggtccgcaccttgctcttggggcttctcagcagacatgagccagatgctctgtgatgggaggcgctgcattgtcagctacctttcatagccaccccaagtcagctctgcatggcttcagtcatttctgatgcagttacagtctccagaaaggactgagggttgggagctcactcttctgagtggttagcatcatagcattttgtatctggaaaacatcttagagataacccacccattcccatgttacaggtgaaaacagtgagactcagaggccataaattattcgtccaagcctgcacagttagtgccagagcctccagtctagggctcttcctatgcttggaggaggccatttgtttgtaaacagtttcctgttagtcaagagaaccagaaatgagtgaagaaagctcattctaaaattccagtcttgctgacagggttattagaaaagacatagaatttaacatttcatatttagtgtagattgttttgaaatgggaatctctgtatgtatgaatgtgtatatgtataagtgtgagtatgtctgtattatgaatgacagtaatatgacagaaatagtttaagataggaaatggcaaatctgctcctctgtgttaggatgattgaccctggtagcaattaagaggcatagttctaagccagtagactctgtatatcatttttgacaccccagttttctcaagaaatatttgaggtttacacagcctgatttgagtactgtttagggggaaaatgggtggagaataaggggtgggattgtggggatctttgattataccttgttgccccaatacggcaggtactccctgcagacagctttggcagaatcactggctgccatggtgtcctgttacacagaagcctgctggccgcaggaacaggaaatagccttttgtatgcgggttcaggctttgctcccattgacttgtttcctcccgtctgcatcaagttcagcaccctgtccctggtgtgccttgttgtgagcaattcctaggaaagcagatcctccttcacacccacacatgtttaaccaaagtgtttacaaaaggagccttgctaatagcagctgccttgtttccagcatacctttgggctttcagaaagctctctgcctgctctgctgcccccactcaaacttactcattcagaagagaattggatatgttttcccggagtcagttcattttcctgggatgccttttttttttttttttcttttctgccttcctcccttctcaatataactccaagtgtttagggttcaattatgcagatgcgaaatttggctttttagtcatttgaaagtatggagactcctagagctcatgactcttctatatcactgtaggaagtgcatagccaccccctttttgttccccataccagtgattgtacttcagaagctgtggtcctgctcaaaaaagactgtttgctttcctcatctccacaggtttacataaagggttgtctccatttttgcctgatgaaaggcaacttgagacagaggaaccacccctctcccaactagcatttttgagcaccccctgggtacggttttgccttctgtgcttttatgttttgtggtttataggatggaaagcagatgcaaccactctccaagaagtctaagctgaaggaacaccaccctagaaggagaacttataaaatcgattctgacattggtgctccatggttcctttccatctttagagcgtttttaaaaacacaattccatgcttgtgacagactttgcctcggttgaaacacatgctgaagggattccttatgacagatgactggttcctttttacggctttcagtggcttctaccttagacagaaaaagagaaattaacctgaactcttaatagctagatttggtctactctcacggaggaaaccatgattgcttctgaaaatgtgttgttgcagatctgaggggtccaataaatagccttccctttattcctggtggtggttcttagtgtgctttctcggccctggggacccctttcttcctgggttcatcctcagggcccgcaggagcagccctggtcctctgctttgttctcttctctcgcatgtagtcattttgatcaatcacatcctgtctgtgagtacagcagacccatcagataggaaagacctgattttctctctcaagtttatgttacaggtcagatttgattaccacttccctctaagaccccctattttaggtggcaggagagaagttggtggagaaataagagtggagtcatctttagtgatacgtagtgcctcagatttcccaagcactcaagagtgagtgcataaaaacccaacaccagagggttgttcatatatcatatccatataaaaacatgtcaatttgttgaatttctctaatatagtaattaaaataatattgatactgtttctgaagattgccatataaaaagaatgaattatagtttttaaaaaaacataaaaatatttaaagttcaacaacagttttgttgttgttgttgttgagacaaagtctcgctctgtcgcccaggctggagtacagtggcgtgactcagtgcctcccaggctcaaatgatcctccctcctcagcctctagagtagctgggaccacaggcatgtttcactgcacccggataatttttgtatttttttgtagaggtggggtttcaccgtctctacaaaagcctgttacccaggctggtctccaactcctgggctcaagtgatccacccaacttggccttccaaagtactgagattccaggcctgagccaccgtgcctggcaacagttttctttcctttttttttttttggaaactttctgtgacatagcattgatttagcccccgaaaacttgtaggtagttcatggctttgaggtgacactctggctgacctataactgcagtcagccagggtgtcaccttaaggccatgattaaaagtcaaggatatttgtgtttatgctggagtgttaggacatggttcttccctccatgtttctgtagatttgaaaagacacaccatccaatataactctgggtgaggcagggtgacggatggattatccttgctctgtgggacctgaggctgagataaagacagtttcttgtttgtcgttaattagtaggtttgtctcagagctaggccttgtatctttcctattagtaactttaggattgactgatgatgcctgaaaaacatctatcacctgttctgactcatccaatttgagagtaaatctcagaagtctcaggtttcttcaggaagttgagttcagaaattgtttatgagatcaggttaaggtgactttcctctactataagcactaataattgtccataaaaagcaaatatgttgtaatcatgtatttatgacaggattatattttcttggtgattgcgcatttaggaagtgaagacattttacagccatttttttccccactaaaagattgaaaaggttaaagtgtacagtatttgaaaatacacttaaaaaattaggatttctctgggaagaaaccaaaacttaagaaagaacatgattaaggttaagccattgtaaaaggatatcaacgtgactaacacggacatatatgctccaaattgtgaactacacggtacaggaagctctcctaaaaattgtactctgccagaaaaagaggtcaagggctagaaacaaatataaaatgaaggttcagtaagatagagtctttaactgtgggaaacatttatcaggttctttccatatgctaaactctatattatattatctcatttaatcatcagacaactttatgaaggagatattcttatttactcccattttatagatgaggaaactttaatcttagatacgtaatttgtccaatcacacagtctggaaatggtggagcttggattggtaatcactcattcacaaggtattagagaaggcatgggggtgtttggagaccatggcttttgtttaaaaggttgctatcctctttaaaattgttttttatgctagatctagtgaaccccataaccccatatggcagttcttatatttcctttttttttttttttttttttttttgagatgcagttttgctcttgttgcccgggctggagtgcaatggcgtgatctcggctcaccgcaacctccgcctcttgggttcaagagattctcctgcctcagcctcctgagtagctgggattacaggcatgtgccaccacgcccagctaattttgtgtttttagtagagacaggctttctccatgttggtcaggctggtcttgagctcccagcctcaggtgatctgcctgccttggccttccaaagtggtgggattacaggtgtgagccactgctcccggcctattttatttttctttagtaactctttctttaagtcattctcatagactcttaggacagtgaccttgaaagagactggcttgactctagcctatcctctgagagacaaaaagacaaagatagatcttctgacttgtttagggatcttgagaacttacttttcctaatcttggatatttggaaaggcctccactaaaagcaaaactatcctttaacagacttttctagtatatattctggcagtcaggatgtaaaacctaaaacctcacgatataaacctctttggtagcttaaagagaaattagagaattactaattatgacttaattttaatattttattattcactcaagccaccctgaaaggttcattcaatagttgtttattgagtactatgtgcaaggcattatacttagttatgctgaatctgatcttggaagtctttaagaataacaacatgagacaaacccagctaccctagatagcatagagtcatattttaatatttatttttaataatgatgattttccatttaccatatattatttaatcttcagtctgaggattcaactctttgagatagtattatcatctccattttgcagatgaggaaattaaagctcagtaacattgagaaacacagcccaggtcacaaggctcaggcagggccttcaccatgtgagctcctaaagagagtcaaaatagtttttctgtagtactttatagttatcaaaatgcttttacttgcattatctcattttccaaaaatgagagtatttattattgtattcattatatagatagctcttgtatttattatatacttaatatgtgctaagagtgccaggtaccatattagacatggcctagttcatgtaatcctcacaaaaaccctaataagtatcattattcccattttatagatgagccaccaaggcctaaaagtttaagtgatatgctcagcacagcagggaggtttaactgaagcctaggtttgtctgcacagccaggatgtgtgaccactttactatattcacttttctgtattatgctgcctcattttccagatgaggaaactgagattcagagttagctaacccagatgaggtcatacagcttatcaatagcggagctggcacgccaactcagatcctctcactagaaagcccacttgtttcccactgtactgagccgcctttctgcacaaggagaactgtatcttacatccaggttgagtaccctaattccttttcgtcattttttacatttctttgtatttgttcttgtttttaggcagggggccctagacggatgacttgttgcaggagaggaatggtataggttaaactgcttgctcaggaagtcatctggggaagttagatgagaactcaaatccaaatttgagtcctgtgtacccaacttatttagctatgtggttctcaacctctttgtcttttgaaaatgttgcttgagagaaggacttgcccttgcgagactgctttcctgtgctgtaaggaatgaatctttttccatctgaagatcatttaccgtttctctgaatactgaattacattaatggtgtaaggcaaggaagtatgtcaatatcagatatataacaaggaccagtcactcagatttgaaatgttgccaatctctacaatctcggccttgagaattttaaggcacagaagcccgttactttaatgatcaattatcctttagatttctgaaggaaaagtttgttaaccacttatagtactgcttttttattcaaattgcaaactcaggtaaatgttctttaaaattgaattggatgacatttttctgtatatgtcaatgtcagtaaacatccgataaatatccaggtgtgtttaattattttgactcaaggaagtatgtcctatttaaacaatctttaaataaattgtttctgaattgaacaaataaacaagaaatagctgaactaaactgctgtgactgtatagaaaaactgagaggttttaacggaggaatgatctaaaaatccgcatcttattatactcatttttacttttagagataaacctgaattaactgttcaagtatattaatagtttttattttcaaagaataataggtgatgtgtagggataatttgaaacctattccaagtgtattaactccagttcagatatgtttgaaacatggaacttaccctatgtcacccagagttttttttttaatatatatatgtatataaaataattaatgcctattaagtctattttgtgctagttttctcttaatcgttttctcctgtaattttcatatccttatgattcaggtattattgctgcccctccttcctcaccttttacagatgaggaaactgaggctcagagtgactgagtaattaagccaaggttacacagaaagaagaagtctcagaacttggacctaattctgaacattccaaagtccgtgcatattctaagataccaagctatcttgtgaacagcctggtctattagaattttaaaaattaacataatttaaaaattagcataaaaacgtgttaagagaaatttggttatgattttgtttgattagccctcaagtaagagcaaaagagtttgaaatacatactttttttgctttggaaacatacagcacatttacctttttttctgtatataagcagaaggtcttttaataaatctatgtggccttgagtttgtacctccaagaaactcctagagatacatcaaaaaatattgttaatgttcagcaattaaacctaaacagctgactgcccattagttttattattacaatgactgtaggtaacactaggccaaattccagacatgtgacttcttctaaacagattccagtaggattaaaaacatttccccgttctcctgttttggggcattttcttactgtcagaaactatggtgcttaacattgaaactggctggtgatgaaacttttcagttcttaatggtagttgactttgaaattaaatttttgtctttttcttccgggttattttctgttttagctttagcatgagagtaacgtaactggcttccctccttcctgttcatcttacgtgctgcccctccattctcattcctgcccttattcccttcaccccatgctagaaagggccattccattgacctgcctgaaaagaaagtgccctgagatgaaatcatggaatcatgcactttaaaaccaaaaagcatgtctgaaagatagtaagtagctggatatgcagcagcgaaaggcacagtctacatagtctttaaccaagttaattgttcagaaaatattctaacttagaaaaagttatccatgttcactggaggaattttagagatacagaaaataaatataattccactttgtaaagataaccaaagcagattgttttctaaatgactattagactttcgaaattgaaatatttggaagagagagacaaatagtctttatgcatcatccattttgttgctttcattgagactcaaagtctagaacgctttgtgctatttaaggcctgaaaggatggggttataagagataaatagccattccttatatattatatatatataagccatttttttttctctccctgtttttctgctttttcctttctgagttttgggttgcatgtttctaaggctgcaatggttgctatactaaagatttttctttttctttttcccagaccccaggcaggcacagtcttccccgccgtggtcctatgaccagtcttacccctcctacctgagccagatgacgtccccgtccatccactctaccaccccgctgtcttccacacggggcactgggcttcctgccatcaccgatgtgcctaggcgcatttcaggtaaagaccgtgctttaactaaaaatccatccctgcacaggggtcggggggagtgggatgggctgagcctgtctcatccatgctcacagtgactctctattagaggcatgtgggcaagggaatgacaactggcaaattaaatcttctgaattatggggttatcaaacactggaacattttaagtcaagagactgaaaatccgctagagatggcatacttttaacatggtatttaatgccgcccagttagtgtcctgctgaattgtatcccatttggtgggcactgtctcataactagggccttttcctgagggtattatgccaggatttcctctgcttgtgttcctttcttttcgtaacatctgcctataaacaagattgatggcacagccctccattcctaaaggcttataagtcccaggagtccaagctagtcagttccaagagagagcacctgcaaacttaggatctttgtcagaaactagtcatttgaagtgctgtgaggcctggaagaatcttaaaagacaatgcgtggcctctgagtggctaactcaagaaggaggcagactttctgtgaaacataatgcatgctgctgtcacttgcagcccggcagcccagtgctcacaattcctctgttccaaaggcaccacagaaatgtgtggcccatggggagagtgtgtgtgacagatgacctggctgcccctctatcctggagaattcatcacagagagccagaaagtgttcacaaaaactccaaactgacaagtagagaaaagttaaaggcccttagctgactatatgagtcccatgaataagaaaagaaacctcttggtccaccctgacatatgaactgcaaacattgtccccactcaatgacgtacgtccacagaggcacacaccccattggatcccacgtttgccagatactcttctcagcgttcgggcccctgcacctgtttgactcctggccaggttaatgcctttctttctttctctttgtgtttctgtctctgtttctctccctctctcattttctgcaaagctcgaagccgttactcactccgctgagttgcatcactgacaagctgaagctccaccagcaggcttgcgggttttgattagttcagactcctttatttctttcaacttgggaggagggaaggctttgtttctcaagcaaatagcaggaaagggctctctggtcctagtgcctcacattttctgcagcagatggactcccatgggggtgagtagggaaagaagaggggtggagggagaattgcaaggttttttggaaaaccatgttaccacttttcattatgactcctgttatcatttttacgaatcacatagtatgtattggggaattgtatagagtatagaattttagttatcatttcccttgcctgggatcaccgtcgccttcaggcaaacattaattaaaggtacgggaaaggatgagtaaggcacagtggggataacgaaggctgatgcgggattaaaagcataatgttgatggtgttgagttagttctggttattccttctgcatttcatactgagaggctgttttgttttacatagggccgaaaggacactttgacagaatagacttatgcaaacttgcttctgtttggggtcccctggggcttccatctgcccaacccactgtggctgaagcagattttgctgtttttttctctagcagtacctacaagaaaaaaacctcagggagtgatggtagcattagagacacttaactacagcagtttcctactgaggtatattcctgtgagttcaccaggaaagccattgaaaataacattggaaaaatgctgcataaatgagtagtcgtcattgtttatcatgtacatgtgtaacggaaaacagccagattatttcaagttactttactgagggttacttaaaacatttccacaaaacagtacctttcccatttcacaggtagggaggcaggagcagaaactggttaattttccagccatgtatctatcttaggccacaggtaggagtgagcctctggtttaaactggtttatactgagtttagtccagttttttcctccaacccttaacatttctggagttgtcactggtaaagtaacatggtgccagggtgggaggttctgtataaacagtaaagagaacagaaaatccctcttgtcagcatgtaggtagggaaacaggaagaaacaactagacatggactgtcagggaactggaggagccgtgactcacctgaccttgccctgggctgcggggctgtgcctgcacacccaagcactgcctggtggactcaaggaccatgtcatcggagtgtgcaccatttctaattccctggggactagtcctgggagccttcttgggggagcctgtctcataggttcccaggtaccaagttagacaatttatatcttatgattcctctcaacatctaaacccaatgtctaagtccatgacctagaggctcctacatgtgagacttaagcatgaggggttttttaatttgggttttttttttttttgtttgtgtgctttagtaaataaagtcctttggattgagtccattcctgtgcctttagtcttcataatgctctgtgccaaataatgctgtttccacataacgcggacagctaaaaatactaacctctatccctgtttacaggcagtcctgtggtctctttttgaaatgctttccagaacagtttatgtttttgtgtgcattgatcaattttcatctccatatctaaagggatacacaaaatattctcatatgattttgggtgagaaagaataaaattcttcacttcacagtaggattggatgttcggacccaggtttttatcccagctcatacatatatcaggcaacttcttacttctctgaaacttagttttattatttgtaaaataggcatacaatattcatcttcagggttggtgtgaggattaagtgagatacttcatataaagtgtttagaactggcctggcacatgatatgtgccaaatagattgtagctgatattatgaagctaaaattgttttgtaaaaattctatatccatatgtaatttacaggcaagtcttgttaagtgagtcaaattagattagataaaaatctaaacttttaaaggggacttttccttcagaaaatagatcaccgcagggcatatttaaaacaaagcccttagattatctaaataagttaatacccacatggcattcataaagcacttaatgcagtacctagcacatagaactcctcaaatgtttcccattattattattattcgtagatttaaaatgaatatttacagagcaaaaagcaattgggaaccattcacaaaaaagtcaataaagcattaagagaaaataacgattcaattatgtcagacaatagaaagtgctgagttacacttaaattaactaggcatgctaatgctgtgttccaagggatcataggaatagaaacaaccagaaagatccaccagaaagaactgttccaaaagaaattccattttctcctaaaagaccattccaaagaaagaccatgatttaatctacctaaagaccttcagagaatccaatatttcacctttctttattagtatcctttcttctgagtaattttcaagcatggcaacaattctagaagttaataaatgacaataatcacagtgatattatattagatagtcttgtagttttcctcagaccatttttggaaggaaggtataaacaaaataagataaaatgataaaggtatgttacctacaatccttactttactgcagagaaagatataatactagacgtcttcaagttcagaggtacaatacaatgattcaggaaatatttccttaacattgggtagccttaaatattgtaatggaacaacaagagcacatataagtttgtaattgaatgagaagttattgccatgtaattgactaacaggtgtatgttatggtaatgagtttgaatcatattcagttgaattataaaagtcagcactagtctcagaaaccagtctagtgatgttacagtgcagaagacacctcctttcctaccatacttacattgatacatatggcctcatcatataataatctgtatttaagtagcactcctatccccaggtgattttatacattatctcacttcatcctacatgtttctaaaagattattcagtacacagaggtggccaaagttatttctcattgattctagtcaagggtaaggtgtgacaaggcaagccttatatgacccgaaccactgcatgtctttataattgcaatcgtatcacccatggcagttttgatcttcaaagcacttgtgaggcttgacacaaagattataattacatttctggaagtcattacaaaatactatgtaaataaataattgctgactttcaaaatgtattttatacaattatcctactatggaaagaagcacaactctttattgaggctgattgtttgggtcagagtatgagtctcctagagagcttacacaggttttttttttcactgcaaataactcctccactatcccactcatttgagtgaagtagcttagattaacctaagtctgtaccactctttggcataatgaagtagaagggatttatacctttctgatgctttctggaggtttcttagagacttaggatatgttagttaaagatgcacaggtaagatgcatcttattcatagatgttggctgcctcagttactctgaaagaggtcactatagatttttttttttaagagacagggtcttgctctattgctcaggatgggatgcagaggcgtgatcatagctcactgcagccttgaattcctgagcttaaacaattcccccatctcagcctcctgagtagctgggactaaaggcctgcaccaccttgccaggccaatatttttcatagggacaggatctcactatgttgcctgggctggtctcgaactcctggtctcaagtgatcctcttgccttggcctcccaaagtgctgggattacagacatgagccacctctccctgcttgccactatagattgtatggaagattcttctctgcatttatggggtttttgtttgttgttgttgttaacataggacagagttaatctttctgtaaggttatttttttcttctgcttaggaaagtagtcttgaatctcttatttcaaaatatgtaaatattaacacttttcacttactcaactgcacaggactattgaagatgtctccagttttatgactttcggtggctaaactataatattccaaggtcaggagaataagcattagtttaataatacaattattaaaaattattttatcactactacaaaatctagaaattgccagtggaaaaaccccaccccatttgagtactcaaggtctgtcaggaggattcaaacccagtagagtttgaggttgttcattctaaaatgtcccttataacccagtctctatcaagtccaccgagtcaagttcttgaaaccagcagcttcgtaatgtgccaattatatgtgaacatttattttagcagagcagctcttaactcacaggagggaggaatgccttaagaaaggttaaaaggaaaacttcagcaattaatactaataaaccagaaagttaaagcaaccataataaaacactagagcatctactttttactacagaaccattcctttcttaagagccacctgtttggtagacatactctgccacagcagccacaggcaaataattaagtttaataggagtaactcttattttgaagaagttctccgtttaaagccacagagtggggaagttattaaattttatggaccctaaacaaaggcaagccctgtgtcaaaaattgaatgttccgtattcttcattatatcgccactgattggatggattacttttgcattccataagttgaaattcatcttgctttccctaaaaatagcctatcttttgacatagcagatggtgttctaatcttacctggacctccgtttactctaatttttgatttactcctgctgaggcccaaagaagtggttttcattcctactagatcagttggagataatagttggtccagctcacaaagtttactaagcttggttgtatgattaattactgttatttgtagctacactgagatactaaagctcagaatgaaacctgtgtacatggtttgactctgattttttacatggtttttctcagttgtttttgtggggatttatttctgacacatgtacaaccacccacacatagggaaaagatttagtaatgaaaggaatcatgcttttgcagggatggcaaacacatggttatatattttattgaggatttgctgaaatctcctttccatcaaagaaaacttgagtgtatgaacctcatttcacccaaagtattaattttctaacgatagatacagtggcttctgcagtgcactggggtctgagaagagggggcgcagtttaacttaggacacctgagttttcatttcattgtcactaaagagtctttgtatcattctcagatacagttaatttattgtgcctcagtggtcctatgttaatgaattactagaaatcgctgaatcatatatctcagaggctctgcaaggagtaaggtgctatctgtttagggatttgatgttcttaggacttttagtaaagtttgccttaccagataaatgctagtggaaaaaggaggtcgcataattatcttctaaagagtagaaatgcatgcgacattattacttttatgtatatgtcttaaaattaatactttattcttttgagagattttaagtttacagaaaaatggagcagaatgtatagtttcttatattctcctcctaccatctcccactttctcctgttatttacatcttgcatttgtgtgatgtttgatgtaattgatgaaccaatattgatacattgttatgaaataacgtccatagtttacacagggctcactctttgtgttgtgcagttctatgggttttatcataatgccatgtgtccaccattacagaatcataaggagtagtttcattaccctaaaaatcccctgtacaccacctgttcatctctctttcccttctcttttcctgagcccctggcaaccacagattctttttttttaactgtctctatagttttgccttttccagtgttatatagttggaatcatacaataagtaagtagcttttgcagactggcttctttcacttggtaatatgcatttaagttcctccatgtcttttcatggcttattaatgcatttcattctaccccgaattgcattccattggaaggatgctattatatatatatatatatgtgtgtgtgtgtgtgtgtgtgtgtgtgtgtgtgtgtgtgtgtgtgtatatatttgagatggagttcgctcttgttgcccctgctggagtgcaatggcatgatctcggctcatggcaacctctgcctcccagattcaagcaattctcttgcctcaccctcccgattacagactgggattacaggcacccaccaccacatctggctatttttttgtatttttagtagtgatggggttccaccatgttggccagagtggtctcgaactcctgacctcaggtgatccacctgccttggcctcccaaagtgctgggattacaggtgtgagccactgcacccgaccggatgctattatatttttaaaatcatcaaaggtgctctacctgaacctgaggatactatcttatcttccattttccttttgttgctgactttgtcagtggtcgttcctattagaaagcatttcacacatttcttcctggagaagcatgttttctatcatagcaattgtcaccaaatggttttctgtatcttgggtgcatttttaaattaaatatttttttcctaatcttgcccatagataaattcctgaacatctactgtttggtggtcatgcataccaattcaaatacggaacataccaagttaaaataacaatacagttatgtgactgcttagttgtctcccaaaatatttgactctcctaggtaaaggggggccttttctcttaaaaatgcctggcattccttaagtgtgctgtgctatttcccacttccatgtcagcccatttctttgcactggggggcagggccctgttgttccctcttgggcatgcctttcccaaacaccactttcttcaaagtgaatcgctgtctcatctacacccatttgtatgtcatttctgtactttggacacacctctaatgtgtacatatctttcttttttttttgagacagagtctcactctgttgcccaggctggagtgcagtggtgtgatctcggctcactacagcctctgcctcccaggttcaaaagattctcttgccttaccctcccgagtagctgggattgcaggcatgagccaccacacccagctaatttttgtagtgttagtagagacggatttctctatgttggccaggctgcgaactcctgacctcagttgatccacccgcctcggcctcccaaagtgctgggattacaggtgtgaggcctcatgcccagcccatattgtcctttagcataaaaatttaattgcatgccattctccttttataagcttcttaaggacagtggctatgttttgcatattcttgaatccttataacctagcacagtttttggcacatggtaggtgcttaagaatgtttaatgaaacaagtattagtgggaaagaagattttaaaaaaaagaggaagatagatatgtaggagaaaaaaaggaagaaaaaagattttgttcacctggaacaacaaagaaagggcaaaacaagagaaactttcattgctgataaggacaggaaatagcacagtaagagtgtgcataagcagtatatatttttatctccaagtctttttgcaatatgtttcatatttagaacacatatcaagactgtatctgtttccagaacttgctgctaacagttagtaacaatgccaaaacatattttaggtccagcttgaaaccaaatgatcaaatagaatttttgatttccactttagagtctgacattaattatagccatcatgtaataaagtgtcaaagctcttttctgagaaaatgatagaaattatgttaactaatctgtaaactgaagcacagctattcctctacaacaaagcaaaagatagggttttgacagctatcatttctcatagtcttatctttttcaggctgaatttttcctgtatgccccacctctgcctgttttttttgacgctttctgtatagtatggttgcaggtcatcctactggtctggtcagtggtctctgacacagttcattagtgtccatcttaacgcctcgtacccagaaccaaactattcctctcttctcaggctctggtagtgcaggctttagtggcctttgttcttttggtgaccatattacactgttttctcttatttgccacttctgtcaatctgcatttctccaattatttacttttagagctgtttttttgtagatccaaatatgatactttacagttatccctgttaggttttaccttatttaattcaggtaataatttctgcctgtctagaacattttagattttaataatgtcatctaatacattagtagtccctggcattccttcctgtttggaatgcttttctttcattcatttcagtcatttcaagtcagctcaacaaatatttggcatgtacttaaaatgtgcttatgcaggtgagaagtaaaaaaagaaatagaagatatagtctctgccttcaagaagctttcagtctcatttaggatacaacataaagcaaatgtgatggttacattatagtactagcccatgtagatgccaaaaacatgcaaagaatgctcaggattttaggaaaggagatctcttttgttcctttgctctattataataattcacatccgtaaccaacttaaagccatctgcattaggaaattaaaaaaaaacaacaatcccattcagctcagattatactttcactccgaattgcttcaacaattacgttttcaacttttaaaaattacgtatgtttgatgtgtgtggcttcatgtttcttaagatgtgacaaggatatggaggatcttgtcttttcccagctagactgaaagctcccctaagtcaggggcctagtcttctaatcctttgctatctctccagagctcctgctagattgaagactcccattggcccagggcctggccttctaatccctttctatctctaactcctactccgatgctcagcatgcataatgtcgtgggaagtactagcattcagtagaaaagtctacccaggaatcagtgctgcatgcttcagggttcttatgctgtgactattattagaaattggctaatagatctagaagtaagattctataggagactaagacaatttctgtttacctttatttcatatttcgtaaatgcatgtatggtctcactatgcaatatgttacggaatatgccagcaactctgacaaaatcaaacaacgttgttgctctgcttcagcatatacatccccatatgcatgaatccacctactcattatattgataatgaatatacatataaatagtcttgacaggtctattatttgtgatattaataaatattagccaagttcatacttttttcaggaaaaataggatcactgacatccctatgtcttaatattatttgattacttcattaagcattgatttctcaggaaacattaactgatcactgttgatagaaaggggacagaggaactgcatgattattattattattttattaattttttgagacagagttttctcttattgcccaggctggagtgtagtggcatgatctcagctcactgcaacctccccctcccaggttcaagcgattcccctaactcagcctttctaggtagctgggattataggcacctgccacgatgcctggctaactaatacaaaaattattagtagagacggggtttcaccatgttggccaggctggtctcaaactcctgacctcaggtgatctacccgcctcggcctcccaaagtgctgggattacaggcatgagccactgcgcccggcctgcatgattattttaaattagctcttaggtttgttaacatgcagaaatagttataaggggaaatcttagaaaatagataactaggctggtgcggtggctcacgcctgtaatcccaggactttgggaggcagaggtggatggatcacgaggtcaggagatagagaccatcctggccaacatggtaaaaccccatctctactaaaaatacaaaattagccaggcgtggtggcacatgtctgtaatcccagctactcaggaagttgatgcaggagaatcacttgaacccgggaggcggaggttgcagtgagctgagatcatgccactgcactctagcctagcaacagagcgagactgcatctcaaaaaaaaaccaaaaacgaaaacaaaaaaaaagagataactaaacaagtaaaaagcttttttctaattaaaatatcttatatgataaaatgcaaatgacagaactttaatttgaattgttcaaagtcatttgtggacaacactttgtttcaaatagttcagtcattttcagacttcttttttgttttcctgaaatgcaaacaggaaggcgtattttctggaactgggtcagaatttaagtaacttggtctgaggcaaatctaggaccccatttgactatactgcctaaatttttttatatgactcaataaattaatgaatttcaaatccatgaaagtaatgtaaataaaaataaaatgctgcacaggcaacattgttcctaaatatctcagaggatttttttttaagtagaaacatgccatgtattttccagagagactgtgaccttaagtgatcaacccataactatgcagcgaagcatgggagactaggaggagccctgtgcttttgtatctaaagcttatcgccatctcgcgctgtacccaaaacggtcaccgttccagctctctgtggtaattagtaacaatgctatagttgatggaataaaaataacacatataatgatggttacaaacacaccctgacctgtgccaaggagagcagtgattcatgaaaaatcaataaataaacccattgatgtggtcacaataaatccgtacataattaagaagaaccttttctaaataaaaactacaaaggaaataaaaacaggtttggaaaagaggaaaaagtctgataatagcgttatggtactcatcattaaagaaaacaaacttgtaagctcccaaactacaccttaggaaaacagtacattctcagtgtggcttaaagatatggtagaggctgggcgcggtggctcatgcttgtaattccagcactttgagaggccgaggtgggtggatcacaaggtcaagagattgagaccattctggccaaaatggtgaaacctcgtatctactataaatacaacaattagctgggtgtggtggcgcacgcctgtagtcccagctacttgggaggctgaggcaggagaattgcttgaacccgggaggtggaggttgcagtgagccaagattgcgtaattgcactccagcctgggtgacagagtgagactcagtctcaaaagatatagtagagaactgacctaaaagattccaaaaaggaaagagtttggccctcagagcagttaacaaagaaagttaaagttgttctctaaccttagaaattggcaggtgccacagatactctttgaagggttaataaaacctcacataacctctttaatccagtaggtggttgaaacttttgaattgggtcttgcctcccaaagaagaattgagttcaacactgataaaacagcagttgctcaataaaattgtgctgaattgatttggtttatcaggaaaacatttcttccatgactcaagcatgtagagtggtaattaaacattcatagcatcgttgacagtgtattggaaataggagttggctgggaattgaggagcctctcttttgaatttcagatgtgcctctgagttcttgagcaggtcactaacttctgtaggtcttagtttctttaagcgtgaactgagttaattgggctagtttttccccaaggtatatcataaagtttttgatgtctgtgattctaaattaaggcctgaaagggcaggttttcttacaggagagatttagtaatcatcacatcagaaaactaaattccggctgggtgcggtggctcacatttgtaatcctagcactttgggaggctgaggcgggcagtttgcttgagcccagcagttggagaccagcctcagcaacatggcgaaaccccgtctctacagaaaatacaaaaattagctgggggtggtgcgtgcctgtagtcccagctacttgggagactgaggtgggaggattgcttgagccagggaggctgaggctgcagtaagctgagattgtgccactgcaccccagcctgggtgacagagactctgtctccaaaaaaaaaaaagaaaactaaataccaccatcaataataacactaaaggctaatatagcatttaatcgaagaactaaattaacaggagcaactatgatagatgtcaggaaaggttttgttttgtatttcagttaagagattctgatgagaagcaacctaagatcaggttatttaataccaaaaaactgtacatttagatcttgatacctgaccacagctgaacctgtctttaaggtgaagccttatatatgtgcatgtgtgtcagaatccatagacaatttttgaaatcccagatttaatgtaaaattaaggaattttattgacatctctcatacccttgcatggttttatgtaatttatttgttaaccctctttacatgagaatggtacatttgtaagtgataatttatcttactggagaaatgagaaccttataagctaagagttattaaaacagacgaattctgttaataacagaataaatgtgatcacaggaccaggctttctatattaaagaaattagatctatttaaagaaaatatgatttgaatcataacgagatttctcttaatgaaacattactgtcatagtgttttatgactgcatgataaaaatatttaacacaagttattgccaacattaaagttactcatttattgagcaccgttctgcccactggagatactctgatgatcaagacagaaaggctcttggaactttttctattggcatatggcataataattaaacagtctttagagccaggtctaaattcaggcttctttactcactagctttgtgcctgtggggaggtaacttagcttgtttgtacctcaatttccgcatcagttaaatgaccatataatctaataataataatacctgctttaataggttgttatggggactaaaggatagttaatatatgtaaagcccttagaataatgcctgatgctcaataaatgttagctattactaccaaagggtgggcaattgaaaataataaaatattatctagggatatgtactatgaaagaagtaaaatagagtgatgtgatgaggagtcaatattgaagctgagatctaattaacaaaaaagagttagccctgtcaagatcaggaggaagggagggcattctaggcagtgggaaaatcgagtgcaagggcccagaggtgggaagactgtggggtgtttgagaagaatgctcagtggctggagtgtgtagatgacatgaagttagagagataggctgggtccaagttatgcagggccactacaggtcaagatcagaggtttagatttgctgttatgtgcagtgttaagccatttggcagattttaagcagggtcttgatatacactgatttatatttttcaaagctcactctggcggttgggtggagaattgtaacaggggtagggaggaggttaggaggcttggcagtcaccctagtgagaggacagtggcttgggcttccctggaaatggtggggatagagacactggagtagagagagaattttgctggtatcatcaaaatgctttagtaatgttttctcccaattgttagtttactttaaaaggaataatattgcatcttttacaagtttaattaatgtttagacactattatacaccctaagtgaagtggtaattcaggagttacttgatttattaaacaaatacagaactattaacctggaaatttcaggccagaaatccattttgagatctgaaatgttttgtttgactgaaaatttttaggtttttgtaatcacattttgttaatcttctgatttccaatagctttccttccttggcaccatgcaaacccagattttagtacaatgatgtacaatgatgagatgaattttggggactgaaagaacattatatgtttgtattagtctgttctcatgctgctaataaagacatacccaagaactgagtaatttataaagaaagatgggtttaatggactcacagttccacatggttggggaagcctcaatcatggcaaaacgcgaaagaggagaaaggcacatcttacatggtggcaggcaagagaatgtgtacagggggcaggggaactcctctttttaaaaccatcagatctcatgagacttattcactatcacgagaacagtatggaagagacccacccccatgattcagttacctcccaccaggtccctcccatggcacatggggattatgaaagctataatgcaagatgaaatttggatggggacacagccaaaccatatcaacattcttctcattctcaaaatgtatcttctgtatctttcatacacaccagttccttctactgcttctaaaatgcactttaggtcaggcgcggtggctcaagcctgtaatcccagcactttgggagacctaggcaggtggatcatttgaggtcaggagttcaagattagcctggccaacacagtgaaacaccgtctctactaaaaatacaaaaattagtcgggtgtggtggcacgcaattgtaatcccagctactggggaggctgaggcaggagaattgtgtgaatccaggaggcagaggttgcagtgagcctagcttgtgccactgcactccagcctgggtgacagagggagactctgtctcaaaaaaaaaaaagatgcacttcaatggaaagcatcatgcatgcaggtgtgaccaggctggctttgcaggcaatcattagatgatcacactgggcagtgcgtggcaacagctctgaagtgaagaaacacttaggcaaggggctatcagttccttcaggctggcgagctaatatccagcagtcaagaaaagtcagtccaggtgagaaaccagcacttgtcctccctgtggagtcagtacccaaacagcttcttcagaggactgagaaattggggcttatcttaaatagcaaggaacttgaattgataagggatgaggaacatgttctaagcagaatctcataaccacaagccaagcttataggagaaagctttaaacaggtaaccctgttggcatcacagttgtagtaagctatcactccattctcagatccttcaaccatgccctaaaaggagattcctcctcatgaaactctaaatttggggctctggaagttagcttcaagatcttatgcagatatgaacactttttcttatatttcctgtttaaaatgtaatgaagttccatttctccatggacacagctttctgttctttctggaatcctgaagttcagaggtgtgtgtactgaaaactattacagccatttgttagtttgttttaaaggaaaggagagtagtaaaatcaggacctggagagcacatttcccagtgaccaaacctactcaaaatgtatttgatggatttattttgagttttggaagctcaaggactccatagaagatacagttcaaagggtgtcagcatggggaatccagaataattctcagagctccaaaaacttcatagattggagcttcggatgatgggttggctgtttctttggctgtcaaacctagtttttaacctttctccctggttaaaaactaggtttgacagcccattgagggaaacgggaagaacaaagagattggtacaagtacaatctgtgagttaggcttattgcattccctttcatttagaagggtatagtaaaagagaatggaggtgaaaaaatgtaatgtgaattttctcactagagtcagaagcagcagataacagataacagcccctggaaaaaaacagtcactttaaaaaggaataaaattggtagggtagtttattgaaaagaggcgtgctttctccccatgagccaagaggtctgaatcctgacaatacacatgtgtgtaatgaattcccctcctcttcagatgagtggctggacttgcttatactaatgccctccccctccagtcttaaggcattggtactgatctttttcactccaacaacaccgtggtataatagtgaaaatcaccgcacaggtgggttaggagataggtaactaggagatagattaaaactagggaactggagatgtggttatctttcagcccatttgcagactttgcaagctagtatttgaggtgtcagctttggacttgcaaagccacagcttctgcagatggctaagttgccttcctcctgcactttaccacattccctggtacctaagagagaaaaactatttctccaaagtgaacccctcccaggggtcttcctaccaccattttaataaaaaggttaaatctcaaactgcaaattatagaatgtctagttagaagtttgaaaacaatctttgtaaaagttcattaaaatcaaataagcagtaccactttaggttatatagaaggcgatttggaggtaaatcccttcagttatctaaaaatgtggcaagtaagttccaacaagtgtaacaagcaggttaacactgagggaaacgggaagaacaaagagattggtacaagtacaatctgtgagttaggcttattgcattcccccacagtatcctattgcatatgaagaggtccatggtccagtgcagttagatgacagtggactctggcagcttatcaagctgctgtctccagaggatgctgctggtcatccaagagaagtggaaactcgggcatgtgcaacagaatatgtacagacaaactgaggactcccccaggaaggaggaggcatcttaggagggcaccttgaactcttctgctctgcttcaggaactccagagagtgagggaattaaaaaggagcaggactattgggtcctctgtaacagctcttttctgatggcggaaagtacttaaagctcacagataaagaacatcatgttagaacctcagacaaattaagtgcaggggaagatgggaagaattttagcaactaactccaaaggtgagagtaaaaataaatgcatagcaagacttaatattaataatacttagatagtgctttacatctatagaaagcactttcatagacattatttcatttaatcattacaacgcattgaagtatcaatactactatactcagtagtttgccagcaggaaatgagggctcagagacatttagagatttgttcagggtcatcaagtgaaagggatagagagtgaaaactcaattccaggtcttttagctccacataatatgcttttccctactctgcgttgctgtaggagtctccatatcagaatcggactttgctacaaaggcctgttggctatcatcctaagaggaatatttgttatcactgatctttccagcccaaacctggataacaccattaatccttactaagtagccaaaattcatggtttgatgcagatcagagaacccaaaataaagtaaaatggaccaaatccctaacaagaaataatagtggaaaaatctacctcccaattttgtaaacataaattttattctagaaattaaaaatgtacacattaatgaaatcttaaaacctcaaaataggccaggcacggtggctcacacctgtaatcccagcactttgggaggccgaggtgggcagatcacaaggtcaagagatcgagaccatcctggccaacatggtgaaaccgcatctctactaaaaatacaaaaattagccaggcgtggtggtgcgcacctgtagtcccagctacttgggaggctgaggccggagaatcgcttgaacccaggagacagaggctgtggtgagccgagatggcgccactgcactccagtctggcaacagggtgagattctgtctaaaaaaaaaacaaaactcaaaatatatggttttatatgtggggcgaggaaatttaaagctacttaaattttgcacgatatattctaccttgcaagagctggaaaggttgatacaaaaaatcatttatttaactttggataattcagatcaaacaatttgcttaaataatctagaacagaaaagaaagagaaatagctcacgtggtatctcccatcgaatatgggagcctgaagtgttagttttaacctcctttactgctaaatttaaggatgaaagactttcttaaaaagttagtagtgttcccattttcttttggcctgtgttgggaactgttgttaacaattacatttttttagtttttagaaaagatcctaaatttttgaattgacattttgtacatagaaaacctagatttttttttttttttttttttttttgcacattgaatgtatagctttattacctcattttgaaaactagtactgctttttaatgaatggggaccattctttgcaggaacagtatttctagtagaatttttgaaggtatttttggaattctcagacttgtccaatatgtagcaggatcagaattttagagcagggaaacccacagagatgatttcatccccgcccctctttttactgacaaggaatgtgtgggtcagggagggaaagggactccaccgtgatcaccctgtgaggcagggacagcactgtggccagaacccacatctccagttgctagtccaacactctagaattattttatcctgctactcttctcataggctactgacattgtattaaaattgctatccatggccattgtgacctgaagaagaagaaaaaaaatgaaccaccaatgacctcttcctcctctgcacctttcctcttttcacccgaaaattaagtccttatgaaaagattaaatagatgtggccctgcatctgtggcagcactgtctctcctgaccagtcactgactgttttggtccacatctggagtggactcagtggacatgattctcaggctgagaaaaataggacttggattttgtccttggcaggcagagaacttccactgtttgaggagctactactggactactgtgtgtttgtcccacgtcccacagctagctaagcagaccgggctcttttttttttttttttttttcacggtcatcaaaacaagtagctcctctcagacaccttaatacataattaggtgtgtctgtttacacttgggagacagagggcttcatgtcccagagaaatacaagacgtctgggaacagccacaaacagatgttgaaaatgtccatttgtggcgagtttattactatagcaccaggaataaacattgaagatgaaacccctctgaaggggtgtgtgtgtgtgtgtgtgtgtgttgagaggggaatgttatcgaacagagtagaaagtgaaaggaggttctattttttaaaaaatttgctctagtatttgtttatctcctgcaacaaggaaaatttcgctatttggctttggctgtttgaaggcttttgccaaatgcttaacaatctgtagggtttgatttctttcagaaagaccactttgagaacaaggctctatgtaactaagatgtgtttgtttttgtttaaatcactcagaagagaaatcatctcttgtccattgttaaaaagagagttttcaatcaaaggaaaattctacatattctaaaatatacaaacagctctttgaaactgatgccaaatcaaactctaaaagggacgtttttcttgcagaagttttgagttaattctgtgtgcagggcttgagtggaaaaacgctgagactgtcagaggaacgagttactacaacactacatttggattcggaagttacataaggagcattgtctcaggatagcaggaagactcttgtacatggttttaggctaaatcctaacaacaaagagaaagaaattctttgcaaagtcagtttttcagttaaataaaaggtagtagtttggttcctgatgtcactggatataaacatccagtgcgagaaggcataccagtcatcactttaaaaatatcaattgaaatgtgccctgtgccctgtttttaaagaaataccgtcctttcccctgttgagactttttttttttttttttttttttggagacagagtctcgctctgtcatccaggctggagtgcagtggctcgatctcggctcactgcaacctccgcctcctgggttcaagtgattctcatgcctcagcctcccgagtagctgggactacaggtgcccgccatcacgcctggctaatttttgtatttttagtagagatggggtttcaccatattggtcaggctggtctcaaactcctggcctcaagtgatctgcctgcctgggcctcccaaagtgctgggattacagacctgagccaccacgcccagacctcccgttgagacttctgtttggatggaaagtagtagatgctaatgaggcacctctattgggggaaaaaaggacacaaattggaaacccaacgcgttcacttcagctctgcactaatgagctgtgtcctcgagatggtgccttctttctctgatgaagcttccttatcaatgggtgcctatcctgactacctctcaggctctttgtgaaggtaaaaccaaatgtatgtaaaagcagtgaaaacttaaaaagcaaaatctgagatgttaccttattatttcatgatgatttttgagaggtaggttgatgtgggacctgatggtttgctgggactgaaaaaaatcagaaacagtttttgttcataggataaagagggcaagccagggaactgaggagagcaagagacgcaccacagaactaactggtagtcagggcagagctgtggctccgcaactaacctgaaccctctcaggtaaacacaggtagagtaagtaggaaaggcagttagttgaagatgtacagacagaaggcagatgacacacacaaatttcagtgaaagacaaggatttaggtcaaatctgctattgccatcatttttcccttagacacacatgtaaatactttttgtatgtaactgtgagaggggccatggtgtgtttaaagataaataggacagcattcccatttttaagcagtttaaagtctagttgaacacagccataaaaaagaaagatcatgtcctttgcagtaagatggatggagctggagaccattatccttagcaaactaatgcatgaacagaaaaccaaataccgctgcatgttcttatacgtgggagcctgaatgatgagaacacatggacacatagaggggaacggtgcacactggggcctattggacggtggaggctgggaggagggagaggatcaggataaataactaatgggtgctaggcttaatacctggacgatgaaataatctgtataacaaacctccgagtcacaagtttatctatgtaacaaacctgcacatgtacccttgaacttaaaagttaaattaaaaaaaaaggctatagaggtgattgcgcgattgttgcttccccagcacacttataagaaagatacaaatgggccgggggcagtggctcatgcctgtaatcccagcactttgggaggccgaggcgggcagatcacgaggtcaggagatcgagaccatcctggctaacacggtgaaaccccatctctactaaaaatacaaagaattagctgggcgtggtggcgggtgcctgtagtcccagctactggggaggctgaggcagaagaatggcgtgaacccgggaggcagagcttgcagtgagccgagattgcgccactgcactctagcctgggcaacagagtgagactctgtctcaaaaaaaaaaaaagaaagaaaaagaaagatacaaatgaagaactaattgcctgcagagaggaaggggaggttactgtgggctaaagcaggaatatatgaagaagcttcacagcagagggggactgtgaggtcgattttaaaggctgcttagaattttaaggagctgagatagggtagggggctagtgggatactaagggcggaggggccaatgtaaacccaggcaggaaggtgggaaaaggtagggtagcacagaagatggaaaagggtctggtatgactggattatagagttcatggaagtaaaatgagagacaagactggaaaggtaagttgggacaagattgttgctcttgcaaatgtttgtgtgcccttaacacagagtctagaaacacacacacacctgagcgaaaaagcctgacgtgaagtcacagaacaggtaggcaaacatgaacaaggaaatcccgaggaaccagaaagtcaaacaagataaagattgaggaagccagataaaccacccaagcagaagatgcaacacagaaagtgaaccttgaatataaagccagcttctgtcacaacccggaagccccttatgtatttcctcctggggcaggaacccctcccagggcatggtcagcccaggcctccagtggggcacaggtaagtggctgcatctgactgtagagggagaaagggcaaaaataagcataggtcctcacaggatacagtttgaggctgaagcctgtggctttgatcctagattaacatggattgcgttaggcctggggtagctgtatcttttggagctgaattatagagactgaacagcacttggtaatctggttcaagtcctaggtctaggggcatcaggcaattcgagccacgtgctttaaggcccaggatggcctcagggctgttggaccacacctggggaccaagccttttgagatctattttgggaaattgtatttgaaaaaaatagtgcccccagcttgtcaggttttgtgtgattcggccttgaaaacagccgctgcctgcagcggactcttccttttccccggcatctctcctggaccagtgctagtctcagttacaggtgtagtcttagattgggttggttttagatttaaaggagcagcttgagtcctactttaagaagcagagtccaaccagaactcttcaaactctatctgaaaacattgggctttgtggtgattattcatttcatagtcttttcctacctcaaccagcatctctcttctcagttatggtttttttacagaagagtttggctggacctgcagctgggtgtgtggggttaatcacgaatttcaagattttgattctcaatttatgtattttctagcttggagacccaatcttttcggtttccttcttctctggctctactagttcaaatagtgcgggtaaggaggaatgcccttttaggatggaaatgtttgctatttgctgtgtactgttaccaattcctgcttacaagagtctcatgcaatgagtttacctaaggaatataaaacatggtttgcttcatatcattcagaacaccagtggtaaagacaatatcagaattctggggctgggtcaagcatggctaatgagtgcatgcgtctgcctcccattccacctccatcccagggctgtcagtgataattggtcagaacacttttcatcattgccctccaggtagccatggccaggctgctagattcacatgaaaatgaccccgaatccctgcaccttaggggagacagtgacagcaaagcccccacaagtctggggccaggtcttgggctaccatgtactgatctgtaacttcgacgaaatcactttttttgagcttgagtttgccattcatatagtatagtcagtggcattgctaccttacagaggatttaatgacaaaatggcagtgggagtgctttgatcgagtacttctgcagatctgagctgtggcatcccagctgtttggttagccactctttcctcttagtcaatttttgctaacaccatgggatgctgtggctattccatcacttataggattcatatggttagggaaaagcgactgactagtctgttaagcaataggcagttctagttcccagcccatcatcaagcagcttcaagtcagaacattcctgcaccagggcttcaggcttgctaccaagcctgaaagaaacgctgcgcagatttttccacgggagcgcctcaaagggcagaggaaactcaagggctccttcactatccctgctctccctgatctgctggcataacccaaaacaaccccaggtccccaaagagaatattttcaagtctcttgttttatctgagaatgtatgtgaattttattttagaatatgtatgtttttgttttaatatataaataacgttttaacttactaatatcagttaaatgtccccctttaaaaacccttctccatttgtccacttcttgtatttcatgccttcctatcagttaggctttggtgtctaatatataacatctcaaccagttcataaatttctgcttttaatatagaccaagttaccactagcgcaggccacaggaaaataccagtctgtcctgtctgaattctggcttttttgaaagatttacttaggaacaatttatcatttagtttgcaatttttaaaataatcttaattgaccacatatgttatcaaataagagttggtcttgtagcctctgcctcgctcgccatctccccgccacctcccaccccctcatttgcacatgtgtacaaccttctgccaggatgtcagaaaattaattatgccactccaggcagataccatcgcaggaaaggctctctctgatttaagataagattaccaatatctaagctgttatttttaggagggaaaggctatcacttttaaacctctctccctcattttcctagttccttctctcctaatttggctccatgttttggtagccataagtcattagtggtttttaatttttctgaaactgaaataaggtctgaaagggtggatttgtcccttttttcctccttttttcctttttttttttggctggctaatcggaggaacgcaaccacatctgaagccacttggctcattatgaatttcatggaaactgattctctgaaagtgtttccatatgtgttcccaatatatcccatcctctctaaatgggagcacagacgtgtgcatgggctggaaatggcttcaggatgtgacagggcagtcatatgactgccacggcaccgtgggtggccccttctgaaagacacggtgtcctgggtgctggcctccttcctgcagtggatctggtttcaaagactatccatccttcctaggatttaaaaagttcttaatcaaggcctagcaggaagatctctctcatttttcctcccttttctctccccctccatctttggctcgttccttcccttactctccctccctgtatgcatacacactcactcacacatctactgcctgccccctttccctttataaaaggaaatatattcttccaacaatatcctcaaaatttgggtgggtttaaggaatggctgaattttctgaaaattgccaggtttttttttctctctctctctctctttttccttcagcataacatactttcttagccttaggatcagctagttctttcagaatttgtgagcatgcagtggaaaagtacaattcattacaacacagaaaacaaatatttagactggatagtcgagggactttccctctcttttgcaaaagaatggagtttgctggtcatttcattatcttaaaatgattttacaatctcattttgctggtttcttctccatcagcatgatccattgcatgtcttctatatatggtatattttcctaattattatctaatgaaatgaaaagtaaaactaagttagtgatggatagttggtcattttttagtgtgaggggagaaattcagggaaatttagaaaattggtcccttagaacctcagtgtggaaaatgcaaagtaatattttgcatatagtctacatttgacttttgaataatgtttatccatagcatttctacctctgtcgtgtttgcctccttgagactttggtagtaattcatctgctttgcaaaattttttgaagcatctgtcttctcagcaccatactataaggtaggatctggaagaagaatatgtggttcttcctcttcatttgcttcctctttagttggaaaatgaaaattcttatctaaaaccaatgataatacttaggaatgtgtgcagcagtaagatttatctacataaatgtccaaggttagtttggtaaatgaaatattatggtaagaatttgtgtgcccaggaaatccttgtgtagtggtgagctttgagccagagctcgcttactttggtctggcagagagaagagagaaaaccatgggtgctggggagagcatgggcaaagctcccgtgagtgtcctgagtatataatcactccaccaggaagaggggccatgcttaggagcagtgggatatgactttgaaatagggcagaggactctgaatatgcccatagcctccttccttttcaccccttcattacagaattgctcagatatgctttttgaaaggtggctggcctatgcttgagtaaggggtaatacactcttgttttaaggccctgctgcctgtgtgacttaaaaaggcagtaagtggaagaatttcccttttcatgtgtgttttcatagaatgcagatctcaggaagctcaaggcagaccctctatgttttcctctgcaccctgcatgctctgtcagggtgcagaggtagaatagaatgctggagctaggacagagaaccatgttggagtctcgtgttgccgctcagatctaccatgcctgcaggtttccgtgtctataaaactcatctatagaactcatctatgattcttgatgactctgacttctgcttctgtatactagtctaaaaaaattcaaacaagatgctagtttcactctctgttcctttaaactattcactccaaataaagattatgatcttagtggcagcgattaacccaggatcataaggaaggacgagtgtgcttacctaacagcaggccatgggtttctggcctggccctctttccccttcatctagtctccccagggctccctagtgtggatctacacccagatactggctgggaggcaggacaggtgctgggagtgaagaggaaataacagtggaagcaaagcagaggcatccgtttactagtgtcaactgctgttttgggggctcctgtctgcaatgtgaggtcaagtgatgcaataatgcttgggaatagctttgaatgctctttaaagagagttgtataaggttttataggtatggaatgtatttgaattacattttaggtttgatgtcagcattgctcaatgcttttcatatcttttccttttgtgttaaaactgtacagagttattgtacagagttcccaatccttagactcatttacgtattcatttatccatccaaccatgcactgacattttttttttcattttagcctcttacaatgtactaggttccaagagggatatgagaggaaaacatattctttaccatccaaagctgactttatagttggagaaaacagactaagaaacagctaataattcaataagggagtgagtaagggtccaaaagagtgatatagaaaataaatgctattggaacggaagtaaaataggaaattaaataatagagctgttgggaagggggcagccaaaacgtttaaaagggggagaagattcttggttaccaggggagagcagctccacataggtcttgtgtattacatgttccaatagaaagaactctgagaggggttaataaaacgtccttcggatttatttgagatttgttgaagcaataactcctaccatttaaaaggccccaatgaagctttgaagttaacacctcattgctgagaagtacaatggcttttcattctgtacctttatcccctcacataaagtgggcagaggactctgaatatgccagcatatgttcagtctggattcaaggccccccttccttttttctgccctgacctgcctgctctgctgggatgtgtgaatgtactgcacagaggccaagaggacatggggcatggggtttcccagctgacagccccaatggcaagtacccggtctgttattttggtcaaattccaatttcttttttgttctagagatctccttacccattttccgtcaaccaaccatatttattgggggcctagtcaatgagaaaatgtatgttaaagtaaaggccttcaaatgtcaaacaggtgtgactgttatgaagttctgaaggggaggcaaagaagtatcagacacttctctaccctccacagctcactctcagtgggagccaaacgtgactcaggataagcagcattcgaaaacagtgtgtgaaagatgccacagggaggattcccggccctgaaaattgaagatcagacattctgtttgattccctcttatcttggtttcacacactttccacttgaagacccaagaaacctagttgggtaaagagaggctatttccttttccctcatagaccttgggaggaggggcaagatgttttaatttttattagtgattttatttttatttgtgctccatggaaatgttattaatatattctttcctgtgtatattaggttgtgaaaaattgctgctgccgctgctgttactattttaatgagcaaagttcttgcagctctttttatgacagctacatttgtttgcaagctgtttggctttggctaggggtgtagacagcagttttggaatgaaatgcatctgtaggaagccagcaggtcctaaggggatcatacccttgaccttggtctcattcacatgttgccctgagcaaccaaactaattgcccattatttagcagattagatcaacaaggcctaaaagagttattaataatatcccaaagataggaactctcactggggcaacacttaggcagtagaagagtcaatttaagtattttgagatattttgagtatttttcatttaggcaaatcaacttctaagatagcaggtgtgtatgtgtatgtagatagacctgtgatcatgttaaccaaattccttaagggtaactaagatagcatatcctttgttagaagtcaaagaggtctgtctagctgtggctgtgattttgtgatattgagtaaatggcttcttttctctagataccagctttcctatttgtcaaacaggggttagatttgcattacctaagcagcaaattaagagtttagacttttccatcagagttcctcaaccagcataaaggagtatttgagtaccttgggggatctcggatcatagcctaaagctttacaagagcaaaattttgttgaagtcattttttatttatctaaaaattcacataaatgttgcactctcctccacatcatattcatgtttattgtatagtgtattattttccccaagttgagtaaaaccaacccatcaggaaaatgcacgatgattatcttgggcttctagtaactcctggcagtcccccaggaagatgtaggcacataccattttgaaactcttcgcaccaagtgatctagtgttggctatagcactctcaacttctccactgttcagcaaagcctaatagccgaatgtactttgtatatggaggagataacatggataacagcaaaaagaatggacttgtgcaagttgttccttgctattttaaaaaggtccccaaaccacctttggctttatctatccagtaagttgtagtcatgagttttaaactggctcttgggagctctgagcgtaccaggcatatcactgggggagtggctgagctttggttttatatttagaaaatcagattggggttgcactgcttttagaactctaggccttcataatatggactcttaataagtcaaacttatattttgcttactttagttgatgtaacatccagttagttctatgttggtaagtttgtggctacaatgtggttggtgacacaaggatgactagtttaggatacaatgtcaaaatagcccaagcaggggttctaaaagaaaacctgagttcatgtacaaaacagacattggaagcacagacacaaccttattcaatgaaagaaaatttaaggatattatttgcttctgtaactattattatttaaaaatttgaagattaggaaggagtttatagtctttcttttaagtttaggatttctcccaccaccttatcatgattattttataagggatctcgtatggtactagagcaaattgttactatttcttcctagagaacatgttgcaaaatgtttcaggaacatttcttggtaacataaagtgactaagcaaattccagaaaattctattgtttgtaagttgaaaaatcatcctataatccctttcaagtcaacattagcgctctttatcaagaaagagtccattctcaagacattaagactcaaatgcctagaagtgattggttaaaatactgtaaacctagcggaaatttgttgcattgttttctataaaccataaccagagctcattaattgaaaaacaaatgtcattttgtgttagctagcatctataaaccaaaaaggtacagtgatcctggcatgtgatgggcaataaaaacatcagcaaaatgtatcaggtaaaattgagaggaaggagtggggaggggtaaattcaaaaccatattggagtttactgccagggccccacataaagagttttaatgaggcttctgcatcaaaataagtgaaaccatacggaattgtaattattactgcagtgtattttaagtacagatacacctaagaagcagtttttacattaacatgtctatctgtgtgaactccatacttctgcagggggcacacgttggcgttttaagtgcgacttctttctgatacacgctgttcacattattctggttcttcttatatgatctaaatattgaacttaatgcatacagaagtgccctgcccatcgctgttagttctgccagctcaaggtcacctggatgccctgcaatgcagaggctgcctgaggaacgtctgtggcctccatttggcctctgtattgtacgaggcagggcacaagcactgggcgggggaaatgttatggagcatctgctcccatttctgattctgtcataatcgctgtttccacatttttaaatttaagcttgtcagaatttcgtttttgggaggaataggtagaggctagttgaggatggaagaatttataaaaagcagagagtgactgcctgggctgtcagttttggttcttcatcttgaaagtgtttgcttctggccttagaagctgctcactagcttttaccctctgcttatgggcctgcagactctgggaaatactaatgagggatgggaacctctctgtctacccctcccctaaggctgttgcttctccttctctcttggaattcatagtcatagaacattagagctggaagggaacttagagctcatccccctcattttacagatgatgacactgccacctctgacttctgcctctggccttccactctcagtaagaagagccaggcaggtgagacttttaacaattgctgggctgggcagggctgggctgggctgggctgtctggttgttactgtccgatttgtgagttttgttaactatatgttgcttttaaagagtcactttttattacaaatgcacatcatggcacttaacccttgcattttgtgaagattataagcagtgtgcattttaacaaaaattaataaccttcaatcagcacctttaaagaaaagtgttcggattattcccttaataaacatcgtaatatccaagaacaaggtctgaataaaaatgaggtgaagaagtacccattcattaaagtcctcaagaattgtttagtgctttcctttatagctaaaagctgtaggagaaacaaatatatgagatctgaataatcaaaatattttagaagggaacaatatcttaacaagagcactggtattagaaaagggcttgtcacaattctgtcaattctagaaaaataataataaacccaatctttaaaggtcacaactacaagattctagcatttcagaaaacaaatttccacatgaaatggtttataacggtggtttcataacttaggcaccagaaacatctattaaggaggcctactgttagctttagaagtgaaaggacttcatgttttaggggaaaaccatctttgccttcaggttactgcttcaagttgacctgaagctggttctgtaggatgtggtgctggggcctgggagacgggtggggagtgccctcctcttaatctcccctaggcagcgagcctctcgcaaaagctactgttagcacctggtctaaatcaggtcacaagtctcccatcaagacttgaaatcaatgattcctaaggtaccaagcccccttgtgcctcctaactcccattttcaaaaccgactgatctagtagcttatgaccctccctatccacccccagagaagttatgagtttctggtttgatttcactgttgctaagatgagacctctgacaagattttaaattctttaaaggccttaaaggaaatgataggaacatgataggatatctttttgatgttccttcattgatgaaagagcctaccaagagtaaataacagtaagacattattttggaatttctttatattgagttgaggaaaataaacttgtctgacttagtaaaaatttcacttcaaatatctaaagtgcaacgagaagcaaaaagagaaaaaaaatccatgaggatttggttttaaagtctggtgagtgaacctatgtgatcagagtgttgggttggtttacacattgacctggcacacatgtgggtttttaaagccctctgggattctctgggggtgaagaacttaaggatcaatgctgttaagactgcaaagtgggggaaaaagactgtaaagtgactggtgcatttgaaggtctgtctgtggcttgctgttcctttatgggaaagctaaagttttctctttttttttcttgtaacaattctatcattattttaattgatatttacagatttttccctccatcttctgttataatttttaggtgcttcagaactgggccctttttcagaccccaggcagttcccaagcatttcatccctcactgagagccgcttctccaacccacgaatgcactatccagccacctttacttacaccccgccagtcacctcaggcatgtccctcggtatgtccgccaccactcactaccacacctacctgccaccaccctaccccggctcttcccaaagccagagtggacccttccagaccagcagcactccatatctctactatggcacttcgtcaggatcctatcagtttcccatggtgccggggggagaccggtctccttccagaatgcttccgccatgcaccaccacctcgaatggcagcacgctattaaatccaaatttgcctaaccagaatgatggtgttgacgctgatggaagccacagcagttccccaactgttttgaattctagtggcagaatggatgaatctgtttggcgaccatattgaaattcctcagcagtggcccagtggtatctgggggccacatcccacacgtatcaatatatacatatatagagagagtgcatatatatgtatatcgattagctatctacaaagtgcctattttttagaagatttttcattcactcactcagtcatgatcttgcagccataagagggtagatattgagaagcagaaggctcaagagagacaattgcaatcgagcttcagattgtttactatttaagatgtacttttacaaaggaacaaagaagggaaaaggtatttttgtttttgttgtttggtctgttatcatcaataacctgttcatatgccaattcagagaggtggactccaggttcaggagggagaagagcaaagccgcttcctctctgtgctttgaaacttcacaccctcacggtggcagctgtgtatggaccagtgccctccgcagacagctcacaaaaccagttgaggtgcactaaagggacatgaggtagaatggatgcttccatcacagtaccatcattcagaataactcttccaatttctgctttcagacatgctgcaggtcctcatctgaactgttgggttcgtttttttttttttttttcctgctccaagaaagtgacttcaaaaataactgatcaggatagattattttattttactttttaacactccttctccccttttcccactgaaccaaaaagaaatcccatccctaaaacctgccttctccttttatgcaaaactgaaaatggcaatacattattatagccataatggtatagatagtgattgcgtttggctatgtgttgttttctttttttttaaattatgaatatgtgtaaaatctgaggtaacttgctaacgtgaatggtcatataactttaaagatatatttataattatttaatgacatttggacccttgaaacatttcttagtgtattgatatgttgacttcggtctctaaaagtgctctttattaaataacaaatttcttcagtggtctagagccatatctgaaatattgctaagcaatttcagttcatccaggcacaatgtgattttaaaaaatacttccatctccaaatattttagatatagattgtttttgtgatgtatgaaggaaatgttatgtttagttctttcagatctttgaatgcctctaacacagctttgccttctaaagcggtaattagggatttaaaaaacaacctttagccctttatcagcatgaaatgctggagtgatgtggttttctaatttctttggggtaattatgactcttgtcatattaaaaagacaagcacaagtaaatcattgaactacagaaaaatgttctgtggtttcatagttaagcaaaactctaaatcgccaggcttcatagcaaagacatagtcagctaaaagccgcacatgtggatagagggttcaattatgagacacctagtacaggagagcaaaattgcaccagagattcttaaccaaccagccttaccaaacaacacaacaggggaaccccaatctgccttacccaaggccccactggcagctttccacagaatttgcatttagaggagcagaatgacatcactgtcctttgggagtaggtcctctgaaaaggcagcaggttccagcaggtagctgagctgagaggacatatggcccacggggacctacagacagcctttgacatttgtatttcttacaatggagggccaaggagggcaaggggctgtggagtttggtgtctactagtgtgtatgaatttgagctagagtccttctgtggcatgcactttgaccactcctggcagtcacatggcagatttccaagtgcaaatccttaatccaaacaaggatcatctaatgacaccaccaggccaatccctgctctcctccccgaaaagtcagggtcccttcattggaatcctccacccacccaagcagaatttagcagagatttgccttcaaaccctaacggcccccttgttctctggtccttctcaaacccacctttgtaggccacccagcattgcaggacagcgtgtggggcagctggacctgtgcttcctgcctgggagtctcccttggaattcatcctgactccttctaataaaaatggatgggaaagcaaaacactttgccttctaaaggccgtataccaagtatgcttagataaataagccacttttctattacttaagtaagaaggaagtagtaattgatactatttattgtttgtgtgtggtagcttgaagcacaccactgtccatttatttgtaagtgtaaaatatgtgtgtttgtttcagcagcacttaaaaaagccagtgtctggttacacatttcaattttaattaattgacataaaaatgctaccgccagtgccagctgcatcctatttaattaaaaaggtactatatttgtacattattttttaatgttaaaagggcttttttaagtttacagtacacataccgagtgactttagggatgcttttgtgttgaaatgttactatagtggctgcaggcagcaacccagaaacactttagaagctttttttccttgggaaaaattcaagcacttcttccctccaccctcactccaaccaccccaatgggggtaattcacatttcttagaacaaattctgcccttttttggtctagggattaaaattttgtttttctttctttctttttttttttttttcactgaacccttaatttgcactgggtcatgtgtttgatttgtgatttcaagaccaaagcaaagtcttactactactgtggaaccatgtactagttcctgggaattaaaatagcgtggttctctttgtagcacaaacattgctggaatttgcagtcttttcaatgcagccacatttttatccatttcagttgtctcacaaattttaacccatatcagagttccagaacaggtaccacagctttggttttagattagtggaataacattcagcccagaactgagaaactcaacagattaactatcgtttgctctttagacggtctcactgcctctcacttgccagagccctttcaaaatgagcagagaagtccacaccattagggaccatctgtgataaattcagaagggaggagatgtgtgtacagctttaaggattccctcaattccgaggaaagggactggcccagaatccaggttaatacatggaaacacgaagcattagcaaaagtaataattatacctatggtatttgaaagaacaataataaaagacacttcttccaaaccttgaatttgttgtttttagaaaacgaatgcatttaaaaatattttctatgtgagaattttttagatgtgtgtttacttcatgtttacaaataactgtttgctttttaatgcagtactttgaaatatatcagccaaaaccataacttacaataatttcttaggtattctgaataaaattccatttcttttggatatgctttaccattcttaggtttctgtggaacaaaaatatttgtagcattttgtgtaaatacaagctttcatttttattttttccaattgctattgcccaagaattgctttccatgcacatattgtaaaaattccgctttgtgccacaggtcatgattgtggatgagtttactcttaacttcaaagggactatttgtattgtatgttgcaactgtaaattgaattatttggcatttttctcatgattgtaatattaatttgaagtttgaatttaattttcaataaaatggcttttttggttttgttatgtgtgtaccttgggtcttttcttgttcacggtttctccctagtctgatgtctactcctgcttacacctgggcactgtttggtcttaggacttgccagggctagttaagagaagagatgctatattactggggagaagaaaaaaaatcttggtaaacggtgtcttcttgttttgtcctgttcctagcgaggggtgggcaaagaatctagcagtgaactcacttccttactagcttgtgtctgaaggaaggagtgctcacctcatccttgagtaaggccatttattccaactgggggacctatcaggcgtatagatgcagtctcgatggcttcatgattctaatctctgagaacatgaacagggccccgcaagtgaacctctggctatcaacagaagatctcaggcagcccagatataggctagtctgttttcctttccacatctcttttgggttcttaaaaataaagtcaaccaaagcccaaggatgagtaaaaacggaccttggcctggagggctatagcctcagaagaattctcctagtgaacataactatagtttggagatttttttttcccgtggccattgtttatttttggtaagtccccccccttgtgataaggttgaagacctggggtagaaaggttgctttctctgtgtcctatgctttctgaatgcttgggctcaccacaattctaaaatagggacccaggaaaacatggtgcagagaaggtcagccagtggccaagctgacccacatcacagggagagttagagaccttgaagatctgctcattcttaaccctttggcactattttctaagaaatcttggaaatagttaaattccaagaataggaaatgtcctgaaagcacttgggtgagcttaagccagggaacttgtctgcaactctgaggatgtagatttatttatttaaaaaaaaatcaaacatctgtgtgactttaaagggcattcacaagggaggtggtcacagtggcttgctttctgtctccagttttctctatcaggatggtctagggcaaatccctttattcctctgtgtctcagtttcttggtttatgaaaaggcattgggctagatcttggcactattgacatttcagactgggtaattctttttgtgtgtgtgtgtcagggatgctctcctgtgtattgtaggatgtttagcagcattcctagcctctacccactaaaagttagtagcacctccctagttaggacaatcaaaaatgtctccagatgttgccaaatggtccctgggtggcaagatcaccaccgattgagaaccacttagctagaggctttattgacagaactgatatgagaatacattgcttattaaatcagagtagccaggcagaggctgagggacttcccagtgatggctacacctcaaccttttccatcccttcacttgatttggatgtatcatgagggctgctgttggctttttcgtctgcacctcttcactcctctctgcaacatgggctgtgcagccagtgaacagcccagctgtggggctttgttaagcctggattggttggccatatttatcatggcctgtttctcactgaaacggcaggcggaagaagaaagcaatttctgcagtgtttttgacccctggtgtcccctatcccccaaatatttaatcatcaggcatttctgcaagagtgggtgtttcctgttaactcaatcccagccgggactggcccaataaacacctcaggtctctgtcatagagtttatttggctgggaaatgggtattgccatgtaaacaggaaggcccctgaagttattatctacagacgcagtggaagagccgcatgtttatatttatgggacttgaaaacagtatgaaaggcaagggaggatgtcagggaagccctcattggcagtcagtgagagcaggtcctacagctctttattagttaatttttcattctctctggaaatggttggtaaacaataatgacctagccaagagccactgcagaaatggaggtactggcttgcctgtacctagattaccaggttaacaataagaaatgctatcagttggcctctctgtcctaactattcgaaaattattttagagatcagtcctaggaagcaacaatttggaggtatctaaaaaggatgcttatgaaacagtgtcaccatctctaagttcttctggggaagtggaggacaactcaactgactgctccagttgtagtgagtgtgggccagctcacctgtgaaaatcccaagcaaattctcatgcattcactccttagtcagtttctgtgaggctggaaaggacatcttcatgcaagagttcataacacctgagctgtccaggtattggtactgggaatcaggcttacaccctaggcctatgcaccccaggtatactccaaattgctcccaacccttctcggctcttccattgtctctctcctctggcccggaaaaggtgctaagaaaggccaggtaggaaccagtatgtggagagctgatactcttgatttaaactctgggttctgagcaaaggcaagggagtctttccttcctcaccaccattgctgtggaccctgagaagcctctttgtgtcttcttaggggcttctcagcggtaactactcaatcaggaggccttggaaaggaaattttaaaaagttatgaatcaaaacttaccaaggaaaaggatccagtgaagacgcaaagggtaatacaccagggatgtgtgtgtgtgggcgtgtgtgtggtgtatgtgtgtgtgtgtgtggggtgtatgtatgtgtgtgtatatgtgtctgtggtgcatgtgtgtatgtgtatttatgtgtgtggtgcatgtgtgtatgtgtgtggtgtgtatgtgcacgtatatgtatatgtgtgtgtatatgtgtatacgggtgtgtggtgtgtgtctatgtgtgtatgtgtgcatgtgtggtgtgtgtatgtgtgtatatgtgtgtggtgtgtgtgtggtgtgtatgtgtgtggtgtgtgtgtgcatgtgtatgtgtgtgtgtggtgtgtgtatgtgtgtgtggtgtgtatgtgtggtgtgtgtgtgcatgtgtatgtgtgtgtatatgtgtgtggtgtgtgtgcatgtgtatgtatgtgcatgtgtgtgtatatgtgtggtgcatgtgtatgtgtctgtgtgtggtgtggtgtatgtgtgtatgtgtgtatatgtgtatgcacacacaggtatgtgtgtgcctgaagggagggaaggaggagggtgaagtttggaaagggtacctgaacagccacccactcagagaaagatggggctcaccacccctgcacatgtactcaggagacacagtgtttcttggcctcagttttttatttctgcaaattcttcaaaaaaaaaaaaaagtactgcctttatcccacaagtgataaagaaacaattacttgtcttcaaataggttactgggacaagggacactggatgctccttgatatgtcaattaagggagcagggagaagctaacatttaaggagtttttagtaatttttgtaaagctattattcaaaagtttgtgactcaatccagccctgctattcagatatgctcagccatttgggaagcagagggatcaaatttctggaaacacatttaacatttaccaaaatgtcttttaattcgtttcttattatcttgttgcattgatgtcaggccacttagtggggttttctgcaaaacttgcttcctgttttagcactgcaaacatagctcacttcttgattgctatctattctttccaggtcattctgtcccactctgtagccaataaaaagggaagaatttcccccacctgctattcttataaagaaatcaaggacatagagcaaaatacttttaacaaaaaggcaaaattcttccacataagcccttcagggagtagctcttggagcagtaacattaaatgggaccagaacacaaaagcgcacaggctcatgtggccttaggaaatttctctgggaggaccaaaagtactagagttaacccgaatgtggaaaatggaaataggatagagtgagcttcgtggaattagagatacagtatataatggcagaaactaagggtgtttttgagagatgggaatgccaagaacacccgaaacacaattggatgatggattgatagaaaagtacaaatttatttaaaagcagcaaaaagcagataacaaaatcacatgacatgtagaattgtggcacgattaataaaacagtgttaggatttaaatcaccttcgacatcctctctttcctaaaccaagtcacctatgtatcctaactccatctatctccagcagtgaaatagttggaccaatttcattttctgtttctctgtgagtttcccttcattcttctgcccccaaatgagaggagcgttttgtgggatcattatttatcccagaaatgcttcagcctgattttgttctccctaaccatcatttagtatttaaaatcctagaaatcacaatgactttactcttttttagtagagtgcttaaagagtctttgtgtgtgtagatttgggggcgtagaacatttggctccttacagaaatcttatttatggcttcacagatgagaaatacagagattattattgaatacgattctcaaccacaccttctggagcacaaactgtgagctcaggttgtgcagggaaagattggtgaaccaaccgtcattcctcgtgggcatgagagggagagaaggatccaaggagaaagcaagtttgaacttcagcaaggagttaagtggttaataggaactcagtttttttttttattggctaataaaacctctcagcgtttttcatattatatggtcccttcaggctcctagcccaatggcttaaaaaaagggaaagacaaaaacaacaacaaaaagctggagcctaaataccaatgcagtcccagtcttgtttactttttcatttccgcagttgtaaaaaaaaaaaaaaaaattcctctggtagttcaactttatcataggaattgcaggaacggaccggtgtttgaacaactccagtcattcctgcctcccagtgaaaggaaaaaatatgctctgcctgtgtgtgcctgtttcagaaaaaaagttgaccacgctgcaagtgatggatgcatcaggaaatcttaaaatgaaagcaggggtggaaggagggagcgcagatattgaactgaaacacatctctggaatcctgaatgcaaatgatctctgtccttttattgccagtggtgctgttctcccaacagagcaggatgttcttgtttttaataatagccaggccagatgctaaattcgcctcagcaacatgctgtataagtgagaaggcaaacagctgattcctgttaagacgaacaccaggagaataagccagaaagtatgagaattctctggaggtttttgctttgtaaacccctgtttggcagaaagatcacagaatctgaactgaaaacacagtgtgtcccctgcacccgttcctcggcggagctgcttgctgggggcctttaagcctctcgccttcgccatccagcccttttctaagctgtccagaagacgagcttacaggtttcccaagagggaaagtcggaagccctgagtcctttgacttttaatgactgtagaaaaatactcatcaataggaggatttttttttttacttgttccttgcagtaaaaaatagcgaaatcctgaacacgagccagtatttttaaatggcatctttgttccatctttttcactaccttcttccccctgtcagagtccatcaaatccctcagatactattcctttcagaataagccacacatgcaagatgctgctttcttctttcccagggagctgccagagcctgtgtggtgttctgtgcggctgggctgaccagatcagacagtgaccaggctgcacgccgctgctagctcatgccacctccaaatgctgccctgaaggcccttcctggagagcaggggtaccctgtggaaggggtctgcagagtgttgtcttccagtcattcctgggggctttgcttccaaggcctgcaggaaagtgagcgagagaagaaggggatgttaggaggaggttgagaagctcgccccaaaaataagttccccaaagacccctttcattacctttcctgttcatatcatcctcctaaaccctcatactttctctctccaattgccacatcctcccctgaaatgcagaaagtgcacattatcctttctattttttcctccctagctgtccttgaagttcacttggccttgatctcactagtatgaacatcctggggggaaaggaatgggagccaaagatgattttcctccttccctacttaggatggcactgaagcccattgttttaatgtctttttgaggaaaattcagatttggtaccagtagcatgatcacatatgtacctggcacttttcttaatgtttcacgtgccttatcttaatcttcccagcaacttatgaagaagttagtactgtgtttatccccattttactgataggaaaactgaggttcagacttgtccaaggttatacagctattaagactcaagtctagatctgcttgataccagagactatgttcctaagctcaaactttgggcacaatctctgtatcatctgtataatggaggttatgagaagtaaatgaattaatgagatctaaaaatgcccagcagagtgtgtggcacataatagatgtaaactagatggtacgttttattattgttgataataattaagattgtttttaaaagcataaataaaatgttcaattagttggaatcacaatagagctgaagccagaagtggaagatttttaaaaaatgctattttaacatttttaaaaatgttgctctttgacagaggtttttttcctatatattttataaactatttttctactgaacattaaggttcaggctgttacaacagccattagtccatttcattaaggttaagtttggcaattggcttgctatgggcttcttccctagggaacccggagatatcgtatcacgtaaaccatgaatggaatacatcaacaccttcagaacaagaatgttgaccttacccccatcccaatcctcaatctgtagtctcttccaaggttttccatgtaggtatgttgtgttttgtgtgaacaatgtcactgaaaatgttattattgcacttaatttggcagcattggcttcatctaactagaaagagacccgagccaagaaattcctgtcaacttcaacccttacctttctatgaatggctctggggtcctccttgcaatctgacaaaggggcactacccagttccctcacatctgaagtggaacccctgatctgggcaaggctttgtgttggtgtgcagaagcctggaggagcccagggatggggcacgaccgtttcttgccctaaatgatttaaatcactttgaatgaataggtaggcttctctccaagtatcttaaagtatcttgcagactattttcttaaatctatatggaaaaaaatattatattttactgaaagtccagataatagaaattatctctctccctctcacactctctcccttcttttctttcttctctttgaaaatatttattgaacagctactataggcagaccaatatgttggaaggcttgccgtcattaagaagcgtattggaaagcatgtctgttcaacttaatccatttcagtaaaagaggtttttgtcatgccattctttattttaagcaaattcatgaattcttgagattgcaaaaaacagatattaaaagtagtaattagtttatagagagaatttagacagttttgatttctgtttatagccagtttcattttccatttctcatttcctaaagcaaacactcaaatatttgtaaggtacttggcatctatatttagtcacacaagactttcattcccaccacatatatgggtggtttggtattctaaaagtgggtgattttcatacagtcaaagagggaaaatctactcttccattttctccaccctgttgtagcagccatgaagccaactctccctgaaggggttgagcagtgtattgaaagggggacatcagaaagtggcaaaaagttctgggttccagatccttaacccctactaactagatgcatgaccttgaacaagccacttaacctctcttgaccttctctttaacttgggacaataatatattgccagccagatggtctgctgaaggaccatggagctcttacctatagatttggaatggcttttggaatggagaaattatggggagttttaaaagactagagtctgtctaacattaagaaagagaatggggtccattgtttactgcagaactggcaaaatggtcattttgtagaggatggggaaatggaatcccagagaggtcaaatcacttttgaaggatcaccccatagacagatgattggaagtcaagggtcaggacatctatttcaagcagtttctatactcactcaccgtaagagatatttccttccttcataatagtagcaccttctgcattatattttcattaactacttttttaatgtcctagttttcatgaacctattttcatttgttataaatttaggcaaactgatttattaaaactttcttatataaattaatttccaacatgctgatcccataccatgctccagctaaccttattaattaaagacctgttatatgttactttatttaaaacatagatgaagttagcataccaggcctgacttagaggatgagaaatccagtctaggagcatcagtgccatttcttcctggagaaagctgatatatctgttggcaacatgcttcaagttgatttccgtttagtggacaagagggattttctcacccagacccttgccatcaatgctaagggtagtggcttggaaaggtctttctatttgctgtttcaagctttggcctctagagatggggccatagtcttgacttcattaacatgatgtcctagccacctaaacaaatcaaagcataacagctattcttgaaaaagggcttgtcatctcaattgtaccttttatctgcttgctatctaagttacctataaccaatatccctttgtattagtccattttcacactgctgacaaagacatacccaagactgggcaatctacaaaagaaagaggtctaattggactcacagttccacgtggctggggaggcctcacaatcatggtggaaggcaaggaggagcaaatcatatcttacatggttggtggcaggcaaagagagagcttgtgcaggggaactcctctttttaaaaccatcagatctcatgagacttattcactatcatgagaacagcatgggaaagattttcccctatgattcaattaccttccaccggatccctcccacaacacgtgggaattcaaaatgagatttgggtggagacacagccaaaccatatcacccttcaatttaaaaagtagaaggggaaaaccattctgatggggtgatgatagagcacacaggtattaagtatagtgttataagacttataacatagttcatctgacccctgtttaatgatagacacagccattattgtgccaagtgattctcagacataagtgtcaagtcatttacagggcagaggaaggtggaaagctaagaggaggaggaatttgtggcttcaccccatcccttgcttgagaaaataattgtcattgctttgcttcagtccccaactctagtctgatcttaagggaggggttacatttgtattcattcaaaaatattgattaaacacttactagaaatgatggaaatgaaaatgaatgagatatatctccaccctcatgaagctcaccatctgctcagagagacagaagtataaacttcacagccaggtgcggtggctcacgcctgtaatcccagcactttgggaagctgaggcgggtggatcacctgaggtcaggagttcgaggccagcctggccaacgtggtgaaaccctgtctctactaaaaatacaaaaattagccagatgtggtggtgcacgcctgtagtcccagctactcaggaggctgaggcaggagaatcacttgaatgtggaaggcagaggttgcagtgagccaaattgtgccactgcactccagcctgggtgacagagtgagactccttctcaaaaaaaaaaaaaaaaaaaaaagaaaagaaaaaagaaatataaacttgtacagtgcagcaggtgccatatgaaccaagggcagagggggccccaaggaggcagcaagtcctgggaaaggcaggaagatgacatctgggctggatctggaagcctgagtaattccttgccactcagggtctgaagctgagctagtgtcagttcctgcagtgcagcacctgggagtggacacgtactgccagcatggagctcccatgtgtagctcttcagaaagaaagagaaagagagaaagaaagagaaagaaagaaagaaagaaagaaagaaagaaagaaagaaagaaagaaagaaagaaaagaaagagaaagaaagaaggaaggaaggaaggaagaaagaaagaaaaagaaagaaagaagaaagaaagagagaatcaccccaggctctgcagcattctttagcatgccagactacacgtccacggataggatgagcaagggggtggagtggtggggtagggtgggcagtatcagaatttctgtgggataggagtcatacttgggaaaaccatagtcaatagtagaatttaataattaaaaacctagagaagcacctatgttgttaaaacagataacatgaaaaaatgtgagattttaatgtttaacaaaagagagcatagatataaaaatgttgagaggacagcataaaatgtcaaattttcagtacagaacagggatgtattttatctgattgctcaccctgtacctactaccaagtgaactagagtcttgatagagcagtgagggataattttggcacaaaggacccttcagccttcaataggaaaggttgtcaagcataaatggttggggtaagaccactctgcatggtcacacattcaaagagcttgacaagagctatgcttgtgactgatcctatggaacattttaaagcaggatcttggtgtcttctctacccacacctccacagctctcctttggaggctcaccatgcccctagaggacttcacatggactcccctctctctaagcccacatcagctaaccctttcccgtggacctcccctttcataaaatgaacctgtcctgactctcatcctggaggggtgaatttgcatttccagggaagttttctggaactatgaaaaccttaccttcaaagccccatagcctcgtggaaaggcaggaaccttcctagggatgcttttttggcatcctcacttcccatcctggagccgctgcctccttgcgggctactcttccccgcccagttgagagccattcttctctctcgcgcccaagcatccagcccagatcccttgaagtaagagaggatctgagcccatagccactgtgggttagggtgaaaatgagagagagttctgattctatcagaggcccattttgggagcttgcattgatttctgtctctgtgagagttattttattgattcatggaatctttattagagttattagaacaaataaaacacactcatgcacacacatgttaattcatctatacccctcccaaaccactggctggcgaaatgagttatatttccagccctgacatcttgcccgtttgtcattctccttcctggccacatcaagttccatcgggtttgagtttattggctacacagtgaagtttatgttgtcacagaaattagccttgatggacagggatatggccaggaaatcaggagagctcggcagcttcatggtgttggcatagctgagatgttagggtgcctggagccctctccaagaaaaatcaaagctggctctttgcagcagcaaatgagtgcaacaagacactcctgagggacgagagcctggacgtgattgtgagccgtccagttctcattctactcatccaccctccccccttcctccccaacccttctggtgccccccactgccaaaaatccttccccgtgcaatggaggcaggtctgggaggcctgaggtcaagctgctctcttctacagttcgtggttagctttcgtagcttcttggctgcttgacaacgttggataataattcaatatttcttactgaaatacttgaccttattgttagtttttgtgacaaggggaatttaaaggagctgcaaaaatgcaagcaagtgtggctgagaaaggccagggtatgccactgaatagtgaacagtttctttttctgacatctataaaatttaggtgaaaacaggtcaacattgatcttggcaaatgggaaagccagttctattgttagcaaacgagcttcagaaataaatgtaagtctggttcaatcaaaaccacgtttggttttagagactagtgatgtactttctataaaaaaaaaagtgtatttatatagacacacgaagtaaaaatattctttggccaaaaggatcattttctaagtatcaaatcaacttgttaaagtaccagatgggacccctttcattttcttttaaaatttgtagggtgcctgctcccggaatcttcttttctctttattttgtatcggcaagggcttttgaagattataatcatgtattaagaaaaatcctgcgtcgcctaatgttgggacttattgcagactgtgaactcatgtttgagagagaaatgaagttataggattcaaatatatagctctccagatttggcctgagtcttagaatcatttttatgggctgctctcaagagtttcatatgatatgtttgagctcacagaggaggaacataagagaagttcagtcacttgccaaatccagattgtggagggtcagttaattttagcctactggcagcttgctgatcttattttctctctgtcctgtcctgggatcatctggagtccttgtcctgctataggaattagaacaatcataggggtcagaactctttcttctcccacaacctcccattaacagatgaggagacgaagctccagagttaaatgtgtgttggtttataggattctagaaggattgactctttatcgggagatttaaaaaaaattgagttgaaattcacataacataaaattaatcatttttaagtgaatgattcagtggcatttagtacactctcaatgttgttcaaccaccacctctgtctagttccaaaacatttttatcaccctaaaagaaaacctcgtgcccattaagcagttgcttcctagtctcacctccacatccattttttaatataagttgacctgatcagcttggtttccacagagtgtccagttagggattcacaactttaaataaggcatggctgtatttctggatgggactgagaggagagagggagtatttctcatggggagcagcagaggtcctgggctgggatcggggtgggatgtgggagagacagagtctggagtctcatggtaacacagaatcaaagactttctgaatgtgagggaaacatctgttggggtagctgctctttctggggcagatttttggtctcctgcagaggtgatgatccctttaaagttctcaccattctcactcttgagtgtcctgccttcccatctaggaggtgtcttattcctttaatttgtgttggtaggcatccaggtctggcaccaagcagtccccattctggaagccgggaggtagtgtagtgtagtctcacccaggtcttgagagagaggtctccccgggatgctacctgtaagctgtctccttcaatacccatcatccccccatataatcattttcaaatggcaaatgataatgaaagctttcctctattttgcttccaagtgtcaacgtatctatacaggttatagatgcatatgtgagttgcctgtttaagaaaaaaagaggtttgaggggtattcgagtatgttcagggaagactgaacattgccttgggttgctttccaaatgctctgtgggaggaggccaggagcatggtccagagactgaagaactaggttgtttttaagctgcctctgggcagggtcaggaggtggtctctcctgagtcaggttccttgtgaatctaagggtagcttaaagttgggactgagacaggagtggggaacccagaggccagttatggcactaaaaaagatctgtgcatagatcctgaaaggaaaaacccaagtctctgacccccttgaggtcacatgttctggggcacacagtgcccaggtctcatggtgacccttcttcatggggcatctgttttactgaagagattgggatgggtggggagaagttaaacaatgtaattggtaagtaatttcaaccatttttaaaattaaaatgtagatgactaaattatgaaatgcaatataaaattcataggagttgtgaagataaagcaggactttggtgaaatctactttgggccaaacccaggcagactccccggtattgaggcagttaggtggctgtgatagaaataattgtgaagtcctgtcagtgttcagggcatgtccccagaggcctatggagtggttagctcttgtagaattttctcctgcataccttgtcctttcactcatccaactccatcccttcctgcaaaacatttcccacctcctccatgaagatctccttgccattctgacccaattgctcagtgatagtatatgtagcctgcactgtgagtttggtcctccaatcctcttatactctgtttcagttatctattgctgattaacaaattatgcctcaactttgtgatttagaacaacagtcatattattgctcacaattctgtggatcagggattcagtcaggagtcagcagggtggttctgctccacaggggatcagctggggccattcacttggatgcattcagctggagttgggctggaaagttcaagtaggcttcacaaacatgtctagtttcttggtgcttctctacgtggccttcctctctcccaaatggctagcttgggcttcctcacagcatgatgttcccatggtagttagaattcttacatggtacaggcttctaggaggcacaatagtggaagctacaggtcttttaaggtctaccttggaaaaggggtgggcaggatcacttccactgtgttctctttgtcaaagctagttacagggacctgcccagaatcaaggagagaggaataagcggagaggcaacaaatttagagctgtctttaaactattacatgtattaatagttgaaacccatcgtgactgacttggaagcccatgatcttaatcactttgcaatgattcctcttagatatcatggttctcaatgatccctctcagcgctgattgcagtgggacttagtgaacatctggtgattatttcagggttccagcatcagtaacaggtgtacaaggagaagagattttgggcatgaggcatccctgcacaggcagacacctcttcgtcaagacacaaggataggaagcatcatggtgataaggaaagtgagtgtttggcaggaaaagatgagtccttagtgttttgtgaatggagtcattatatgctttcttgagtcctgtaatagactgagtatatgtcaaataaccggcagttgagggagccttggtaagggggaaatagggactcacatcactttacgtttcaagatctgcagggaagtgctaggtggcaggagtcctctgaacttcccagtgcacctgggggctgccctggccatcactcagagatccagcagggtccaaagagcaacccttccaggaaagcagagctgggactctccagagaaagaggctattgtttcttgccactttaagtagctgatgacagtacaaaggaatgcagttacgaccctcccttctaactatgaaggattagagactgaagaaccagactgtgaaagcctctgggcatgaggtgtgggaaatgctgcggaggcagaggggagccagcgtttcttggggatggcaatgttgattctagaattctgcccctctacttctcaaccatgggactctatctcactgggcctccgttttctaatacacacattggtgatatgagaaatgcacagttgtgctgctcaggattttttttaaagaattaaaaatttaaaggatcttgcatggtgcttgccacaggataagcacttactaaacattaaattttttatctccaaaatgttagaaaagttgccttagaaattgttgaattccatttgtgaatgaccacgctgaggcctggagatgttagaatgattttcaacatgttggtgaatccacatttcctcctcttggtccagggctcttgtttctgttccatagacattgaagcccctctgtcaatgcattttcatcatagccacactggcctttgttcttgagcagagtactttatatgaccccaaagaacacgcggtgacccaaagagaaaatcctagcttcaaaaaacaaagcaaaacgttaaaaaacagacaaccaaataaaaccaattaaaacaccaacaagttttaacatgaaaatctttgaataaagccattgccatccacttaaatcacattagtaagcccttactcctctttgtatttttttctattttagttaaaaaaattattttaaagatcagagttcagaattcttattatttaagggacggggtcttgctctgttgttcaaggtggagtgcagtggcaggatcatggctcactgcagccttgacctcctaggttcaagcaatcctcctacctcagcctcctgagtagctaggactacaagtgcatgccatcacacctggctaaacatttttgcagagatggggtctcactgtgttgcccaggctggtctctaactcctagcctcaagcaatcatcccaccttggcaagttctgggattgcaggcatgagccactgcaccaagccagaattattttttcaaaaagaatatgtctccttccaggctgtgccccactccacccttgcctgccacttctataccagacaagttttacgcaagtccaaattggtctccctcttatcaacaagtagcactgggaactttgtggtccattgacaaggagtcagggcatttcggttgatggaaattagttgtccagatgagatgagagtcaggaggcctgggttctatgagacattataccagggccctgttatgttttgctgcacaacaaatcaccccaaaactcagtggtgtcagagaacaacattttattatgctcacagactctgtggatcaggaattggagcaggcacactaggaatggctcatctccaccctaaatatctgtggtctcagctggccaccttgaaaggcagggggtgacctgaaaggctgggggctagaatcttctgaggcttcttcactcacatgctgggtgcctgactgggctggtcaaaggacaatcttagctaagacactctccgtggcctctccaggatagccgtctcagggtagttagatttcttccatggtaacttgggctctgagaacaaatgtcccagccaacttggctggagctgtgtgaccttttatgacatagcctcagaggtcatgtggtgtctgtcactttcaccatactccatggatcgaagcagtcacaagcctcctcacattcaaggagaggggaccccatctctcaaggtgggagtgtcaaagattggcagccatgatgttaaatggtcacacatggtgatcaagttttggaacactgagaatccactgcctgaccggattggtgctgcttccacggaaaagagacagtctaagagatcagacttggacattgatgtattggatctttggggcatttttgaaggtttagatacagagtaattaaaaatgagactatcttgggtaatcctgggagggaggttaagagttttaagcagtttgcttaagattttcatttgccacatctgagaagagaattcaccaccatctgctttttaactggagtgggactgcccaggtgacaccaaaggaagctttcgcctggaaacatgtgtgggcatgaactagactttacatttttttctaccaacagcaaaggaaatggcagtgcaaggaactctccctaagagccgagaagagggagcagtggcttcattaggaggaggtggttgggccccacccactagccttcccccaacctgtgtacatacccagaaggaacatcgtttgtattgaatccaaagaggagcctttgaagccctcagagatcttcagagcaaagtgctgggtgaggtcagggcattcaagaggcctggatggagggagggagactgggtgtgtgccagcccaggccacttcgaggctgcatgcagctggagggatgccccactcacagctaggcagccccagaacaagtggtctggggcaagaaacacaagttcaccatgccgttcctgacctccctgtgttcccagagtagcaaaagtgtgtggggaggggagaattagaggactgagagcttgctttgtgttgggcactgcgttagtcactttgtgtcattagtcagtctcatttaatcctcacagtaatcctatgaggtaggccttatgattcctaatttacagttaggagactgaggctcagagatcttaaatatcatttttaaggccacagagcagtaagaggggatgatagaattccaaagaggcagatttcatttgccattccaaaatcagcattgtcacaggacaaggacaccaccctctgttctcctcttcctgtcttcattccattccacacttttttcattaaactataatatttccatcactagacttcttgatgcttgcaaaacctaatcccttcatagtcagggtcaaggagttttctgcaaaacatatttgaagaaatgatgatctagagttgtgctgtccaatgagatagcctctgtccacatgtggcagcacagctctaaataaaactaacaaaattaaatttaaaatgcagttcgctggtcacactagggctctttagccacatgcaatgtattattggactgtgctgctttagagagtaagtcgagaaagaattgcattttcataactagttctactgctagtttaattaatacttctaatggtacttgagttacttatttattccaagtctttctcagagataaaataatagacttttttttttaaacagtactttgtagtttacaaacttcattctaatgcaatagccttgcaaagtagagtaggtaatgaggttatgagtgaagtaacaaaggttccaagaggttaagcagcttagccaaggttctacaaacagtaaatggtagagctggggcttcaatgcagattctctcgcgtgtactctccaaagggagaacttgtgtatatgatgcctgaaactattctcaggcaaaattgttaaatcaaaagtaattttttttttttttttttgtgatggagtgtcactctgtcatccaggctggagtgcagtggtgtgacctcggctcactgcaacctctgcctcctgggatcaagcaagtctcatgcctcagccttctgagtagctgggattacaggcatgtgccaccatgcccagctaatttttgtatttttattagagatggggtttcgccacattggccaggcatgtctcgaactcctgacctcaagtgatctgcccgcctcagcctcccaaagtgctgggattacagacagtgagccaacatgcctggcctaaatcaaaagtaatttaccatagctaggtgtgatggaggataaatatccagtacatggaaaggtaaccaacaatacctagtcaggtacgatatgtgtcaaattaatatataaagaataagtcattcattcattcattcattcattcatgtatttcatgtgaaatatgtcccatccactgttctagacactagagacaataacaaaggcagataaacagtaaattcataatgaaataaacaacatcatatcaagttttgataagtgccttgcataagcgaaaagcaaagaaagggcaaggagtgggtggcgatgttgttttagatagggctgttaggaaagagctttctgaagtgggcacacttaatgggaacctgaagaaagtgagaaagtgagctgtaactgtaggagaaacagggccaagccacaggagccatgagtgtgagggccctggggcaggcacatgctctgtttttcttcttgcactaactaatcttatgttctttatctgattatatatttattgtctgtttccccgggtataatgcccacacttggctcaagaaacaatcaggaggcttatgtgcctggaatgtagtgggagagtggggagcggtaggagagagaagtcaggaggagacagggccgaaacatgaaggaccagcagcaggctgtgaaggacttcaggttttcttctgaggtgactggggaagccgtggtggtaatggatggagggcacaagcttttttaggctttatttgttttattattattattaatttagagacatggtctcgctttgttacccaggctggagtgagcacagtggcaggatgctagctcactgcagcctccaactcctgggttcaagtgatcctctttcctcagcctcccaagtagctaggatgataggtacaagccacaacactcagctaatttaaaataatttaaaattattttttgtagagatagggtcttgctttgttgccaaggctgatctcaaactcccagcttcaagtgatcctcccacactggcctcccaaagcactaggatttcagacatgagtcaccaagcccagcctgttatattaattttaatccaaatttttatttagaatacttttaagctttcagaaaatttgaaagaattttacaataaatactctacctagattattcaccaattaacatctcactgcatctctctctctcttctttctctattttcccccctcaaccactttaaagtaagtttcagatatcatgacactttaggcataaatactcattacatatctatatatctatatatctatatatatctatatatctgtatatctatctatatatctatatagatatatctatatagatatatttatatatatacatctccaaaacatgacatcacaccaaagaaactttaataaaataatattatctattattaatattgtgtattatttaaatattaaaatatgttaatacgtaaaataatattaaatatactaaacagcaatatattaaaattttcaaattagctcaagaatattcttcatagctctttaacaaaaattctctgatttgatcaaggatcccatattgcattagctgtcatgtctctttcctctcttaatttggaatagactagacctctgcgggtcaaattaatatattaagagtaagtcattcattcattcattcattcactcatgtatttcacttttccacctccaagttccaggagaggactgttctaattcaagaaaacccagctcagtgagtgcaaaggcttggatgtctaagaataggacccctttaggagaggcccagggaagagaagaggagcctggttcgaaaagggagactggggccagataagggagattttaggtatgaagcgaatgaccggggccctaggaagccactgaaggtttttgtcaatggcccagggaaagcagtgttcatctggctgcagggtgcagagtggattcgagctgagaaagccttcatggtggaaacgtgtgacatggtggcatttgcctctgcccttgtcctctccccagccccacccaactcttccttccttctggttaccagagcaaaggtgttatttcctatgccttcctcctctgcttctggctgtgttgacctccatcctctgtttctcatcctcttccttctttctttctgaactgccccccaccactcttcctttgagatcctttacctaaaatgggaagctgagtgagagggaagttggggtctttgtcaggggaacccacggaacaatagtggagtccacctggcctgggttttcttgagttagaacagcgctctcctggaactttgaggtgaaaaagtgaaagccccaaacccaggaacttcatagtttccagtttaaactcaccttgctgcctctgcaaagttctcactcttctcgccattcctataggctccctctcgcaaccaggaatctaaatcatagaaagcttcagacttagctgccattctcatcggcatggagccgtggtcctcctgtgtccttgccaggcacacctgtgcttctgatggcagcttcatcatggggccctggctattgcttttgaggccacagcaggacagaagtctagtccacaagtggggtcctcggtgagcatggccttgcttctgtggtctggtctgggaagtagctcaggctggggggattgccttggctggaaggtacaacgtggcaaatgagtcttgaacaggttggagtttgtaggggccactcaaggcccaccaggtaagctggtttctccgctgtttctcactatgaaactcgttcttttttgttttgttgtgctgtgttttgtttgagacggagtcttgctctgttgccaggctggagtgcagtggcgcgatcttggctcactgcaaacctccgcctcccgggttcaagcaattctcctgcctcagcctaccgagtagctgggattacaggcatgcatcaccacgcctggctaatttttttgtatttttagtagaaatggggtttcaccatattggccaggctggtctcaaagtcctgaccttgtgatctgcccacctcggccttgaaacccgttcttgcacatgttggtaaatgtttaataactggctctctgagaaaaaaaaaaggaagaaaacaaaagcctttttaatggtgtttactgatttctgtgatgtaaatatggcaaagttcaagctatcaatatgatgtcactaaaaccaggattgagaagtgatgcaccattttttctcacaagctggtgtgaagaagacctggcagtgacagatactaaaatgacagaggattgtatgggacagtgtggcaagtcccgcggctgagaggccatatggtcatgaaagcacggctctgtaggtcaccactgctctgtctggtggctcagcttcctcgtcaaccatggtagtaggagcatgagatggttgagttctgaggggaagtatggaggaagaggaaagtcccctgagttattttgtttgccaagcaaaatataaattaagaagcttgcatgcagcatgggcagttagctgtagatccattggatggaattttctacaaccttaggatggatagaagctaatgacggtctaggtgtgccctctattcaatattctttgactgaaattgaattgatataggagcagcgtgttggtttagaatgaaataggacatttcataagccagccaaaatgcaaaaagcagacaggaaaaccaagcaggacaggaaaaacatcccttgaaacatgagccagggagggttaggtttgaaatgacaaaagatctgagctccagagagtccgagtattacattctgaaccaattactgacagaagtcatgaggctatggacctggggaaggacaaccatgggtaatggaagcaggtggcttagaaaaaaaaagcacctttcctctaggcacactcctgggtaatctggtgtgtttggaacatgtatgagcctgagactgagctatcaggacacaggccatggtgagccagctggggtgtgccaggtgcatgtggatcatgcattcccctattgagttacaacatcctgtgggttcataccagcctcacagtgctccttgcacaacctgctgttcagggagctttccgtaagggcaggtgcttcctcacaatgaagggcatggacacctgctgcactatgcaatagtagtgaggatgggaggagcatggagaagccaaatatgtaggaaaggcatcctcttcttaactcagactgctgagtccctaattaccagctgcagaccaccaataagggtaattccgggttaaggatgaagaagagatgtcatgatgagttagaaaatctcttgactcaatgtgggaggctgggtggcattctctgccaggggcctgcattcttagcgccactctgccctggctaatcctgctactagggcaagtctcttcagtcttgaggctttatcttccatattaacaaaatggtgatggtggtagtcctagctggtttgcaagttcctgtctaattgcttaattctctttttcaccaaggcaagtgccaagactggcttctgaggagtacaggggtggcctaggacccaaactagcctatttggtaatgcagatgtgattcattagcatcaccacctccatcacacagcatttgccattcttttgttagatccagtgcagaatgccctgtgtattttgtccatagtgtttccagcctagcctgggaagtcgatacacggcattcacattctgtttgccataacatgtgccaatggcatatgttgtgaaataattcctggttcctcactgtatctggattaggtgtcaggatgcttaatttcattgcaggtggagcaccatgcctggacatagtggccatgcttttatatttggactggacaaaagggatcttgataagagtttagccttggaaggactcctacagagagcatctatgacccccaaagacagatttcaggcctactaaaagtctctttctcatgagacacttacccattgatcaaatgacttctcattcatggtgttatcagtcctgttacaatgttgtttaacctgtaacatggatataatatctgccctgccttcattttaggattctagggaagtgcttggaagagcaccaagtgcaatgcaactatagggttattaataatgttgctattatacattttgattgatgagattttgacaatgggaagccccctctctccccactctggccacaggacctgttcctaaacgtacatctcagtccacactccaaagacatttcttggaaacgcttctcattgtggttcattctataaaaaagtgctccggctccaagtgggcatgaaagttcatcacaacatttgccatcaataaaaacccaattctttccatgtgaaaagcattactgctgtcaaatggttattgagtgatgatacctgaataatgggaatataggaaccggaaaatatacaaagggaaacctcactgggatgccaaattgtaaagacagaaatgcgaatatctgagggaaattagttaagcagagcacagcacacatgccttcaccaaggagggaagatgagcaggcaggatcggtggaaggtagagagaagaagtgctgggttgagcatggctttatccacttcctggtgggcctggggcaagtcgctgagctatattcaggcccagttacattgtctgttaaatgggaatgattcttccctcatggatgtgtgtgagaaacagatggtatcaaatggtggaaatgagagcatcaacaatgcccttttgatacgtcacagaagacggtaactatgacagcccatagaccacgcccactttacggccagccctctcagtccaggaacttgttgaaagttatcgtctcaaaaattctgtcacaatagctggtgcctttgcaattaagctcctttggtcacacaggacccctggagctcatttgagacacttccacgcctaagggtcagaagctggtccagaacaccaagggagcagcctcttttggcaacccacctggctgcctgtgaggcttcctggccgggatgccctgctgcctcctcttgaaatgcagctctgccctctgctacttcagctcctggccaccttccagttcagctgcacatgctcacatgttaccagcccactcctgtgccattcttggctgaccagaaggaatcagcgcgggtcagtgtggcagacaaagaataaggctttgaagaagtgctgggttgagcacggctttatccacttcctggtgggcctggggcaagtcgctgagctatattcagccccagttacattgtctgttaaatgggaatgattcttccctcatggatgtgtgtgagaaacagatggtatcaaatggctagtcccctgtgtatacagctatacccacgtgaagtgttggtagagtgctcatactccggtttgctggaacactctgtttaggacagttatcccgatgaaatcagtaaacaggccccattttattctcaaaagtgtcctgggttgggtaataaattatatcaccctgggtattgtgatatctggagggagtaaatgaggctgggaactttccccaaagatgttcagatccttagaattccagtcccttcctcctcttttggagcacagaacttcgcatccttcagtcttgattcactttcaaaataataattcttcagttagtccattaaaagaaataacagccccgttttaatttcagcaacggccttggaatgaaaagactactaattactccaattaaccaagcacattaagtgcacatgttcaaacgcatattaagataccatctatctcggtcctgaagttctcgagatgctggaatgcataaacattcagtggaagaattgtgactgcagagaaaacacaaacagagcaggctgtttgtttgtgtgactgcctacttgtggagaaataaccaagagatgtggaaagacatgagggcttctccccagtttatgtttgtaattattgcccagaggagacagaacaaagagctttctatttatagccaaagtctaaagggggttgggagggtgggaggaggaagcttagtcatgagaaaacacaatttactattggcattaataaaattatataaaactgtagtttatcaaaagaacaaactgtcttcagggaaaataaataactccttccatttcctgactctgtatacaaggttattaactaccactgtccttaccagtgagagtagagtggaagtcggctaatgccatgggaacggacgggcttcctgtggaagctaagtctggagcagcgcaggcacaaaagcttcagggctggtcgtgtctgagtacctgtaaccagcaaagccagtgaaggccgcatttctttaggcacacttctagctctctggttgtttctcagagctcagaccttgggaaatgctatgaaggagcacagaagaagctcaagaacagtgctggctactcgtaaaggattctggttgataatatgcaggtagcctcaaggttcagaatcccatcttgcttgagaagagaccaaaggggtggaagacgccacagtggtggcctcctccatgtggaggagctgctttcccagctccaggagacagtacctgcgtcacattatggtttgttctctctctttccttccctttctctcccatctctttttctttctccttttccctttctcccacttgttcatccactcttcaatgatttatgcagcacatattcattattcattatttatgcagcaaatattttgttttttagaactaaaatgtttgacctatgctcaatgcagtgagcacaagggagcacatttcttgccttcaagatcttacagcttcactgcagagacaagtctttcccttctgacatctttattttgatcactgataaagtaatttccataataggccaggctttaacattctaattcctgaagattccatttctttcatcccctctcttcagtcctattgattctacttctcctctattttttctctctctcttctttcctttacatttccactagcatttctacagaaatggaagggttttctttatcttcactttttacaaaattaatttttaaaaataagtattgaattattagattggccaatcactgtgccaggtaatttctatattatcatcccattgaagccacccaacaaacctttagaagtctgttactgccatccccattttacagatgaggaaactaaatctcagagaggctaagtgacttacgtaggccacacaagtggagctctagaaggcctagggaatggccagtttggataccattctacaggttgtgaaaatgattataaagttgcctccatttccaggtaactgattccttgccttttggttgcttaagatcttgtatctaaccactggacaatgtgactccaggaagttcctggtctagggcacagagggtacacttggcagccccattcgagaacccatggcatggttggagtacttctccatcccttccaacaatttatctgaaggtccagagcctctaatgttgtggactggaattagggagggtccttggaggacatgcaaaagaggattttttttcattctaatcaaattgacttgtgttttaggaggctctcaagaccgtagtggtgcttcatcctctgttatgcctagcaagggaagatatggaagatatcggggaggggttcactattctgtatgaatgctccagaatgtccagtaagtgagtcttctgcagaagcagagtagagcaggcactgttatcatcattaagtcacttttgcctcttccttcagtttcactcaattgttcttcctatgactgacctgcaagaacaagaatagtgaagaagttctgttgcttcttttagatttatccattccttctatcttgcatttatgacactgtcccagacaattattttagttgttttgatttgtttctctggttctagtttttgtctcttgatctctaaatccatcttgttctctacttcccacataatattttattctcaagcccttcctgactaaaaaatctacagtatcccattgcctatttttaagatttttttttttttttaagacagggtctcactctgtgtcttaggctgcagtacattggtgtgattacagctcactgcagacttaaactcttgggctcaagtgatcctcccgcctcagcctcctaagaagctgagattatgggcatgcaccaccacaccaataggttttgctatgttgcccaggatggttttgaactcctggcctcaagcaatcctctcaccagtgttgagattataggcgtgagtcaccacagcccgagttttttgttgttgttgttaattgtaaaaaagtaaacttacttattgtcccaaattcaaacaatacataaatatataaaggaaactatctcatatatatgcatacatacatacatatatatatatatacacacacacacacatacacacacacacacacacagtcatgcactgcaaaatgatgttttagtcaatgaagaactgcatatacaacagtggtcccctaaggttacaatggagctaaagaatttctatcacctagtgaggtcttagccatgataacgtcatagtgcaacacattatcttttctatgtttagatacacaaatacttacctttatgctataatttcctgtagtatttagtacaataacatgccatatatgtctgtagcctaggagcaataggctatgccatatagcttagatgtgtagtaggctagtccatctaggtttgtgtaagtacactctatgatgttcacacaatgaagaaatcacctaatgatgcatttgttagaacatatccacattgttaaacaatgcataacagtatgtgtgtgtgtgtgtgcatatataaaaatatatatattcaaaccaaagaattgttccctattttttcttctttgttaactttaaatattttatccttgtaattcatcaatatgctaaatgaaagttcattcaaacaataataagaagtcttacaatgaaaagcagcaatctcctgctccatgcttcaacagcacagctttgaagtcaaaggcctcagctaaactttgaaagcactatgtgacttggtgctgcttgggttaccttttgaaccttttccccacttctcaacttggactaacaactccctccaggtcaggcgcttgtctgattgtcattcttttaagtggagagtttaggccatttatatcatttgtaatagccaaactgtttagattcatttctaccatcttattttgtactttatagtaatatttacctttttttctatatgttttttttttctcctttgcttccttgttttggattgattggttttattcactcaactctgaattccatttttcccctctattccaccctaaaaattttaatatgcaactttaacataatttaattgaaagctaattaatataagctttttctgaacaatacaagaaacaaagaactcttgaaatctaagtattcatctctaaattttacatgaagttatccagattttaattatctcttgatttttaaagattcataaattagacattgttgtttggtacatataagtgtttgtttagatttatccacatgtttacttttatctttgtcattgactcacttgcaatgcagatctaccttctgggatgatttctttctaaaatgaatgtcctttagatgtttctacaatgacaatattctgttaataaagtctctcaatttgtgatagtttgaaattgtgtttctttgaccatccctctttttttttttttttaaaggaaagatagctttctttgtttagaattctagatagctatttgacattagttggttgatctgaagtcattcaattttccctgctggtcttgagagctcagctatgacctgatcattctttttcagacaatctacctgttctctctgattgcttttaaggtctctttgtctttgttgttctgcagcttcactatggtatatctaggcagggatttcttcggtattctctaggctttctcaatttgtgcactggtgtctttcattaactctggacaattcttagctattatctcttttaatattgcttctccccattctctttattgcttcctataaaacattctcaaattattctttacattttctcaccatttttcacatttctcattgctttttttactactagattctgtgtaatctcttcagtattaaagttcattgattttaatgtttaccctatttatttaaattatttcatttattacatttttaatttctaaatttctgtttggtacttttcaaatgtggctaattttgatagtctcttttacctttcacatagtttcaatctcctctcatatttataaacctattaaacatactaattgtatattctatatttgaataattccagtatctgtggtctttgaaggtctgattgtagagtttattgtttctgctgactttcactcagagttgtttatttactttttattactgattttttttctacagagctcattttctttgtaacttaataatatgtagtaattctttgaggctccatttatcaccaacttggaatcaatttaactttgtagagttttattttagccacatttgttgtgtatattcaggcccaaagttataaacctacacatctgtagttagaaatagggagggggaactttttctttttctttctttgttttttttttttttttctactcagagtcaagaccaagccagtcatgtatctccaccttgttctgtgggatagatgtttttttagctccgtcaatggagtgttgcctttccatgatattggcttatttgtgggtctccattctgatatttcactcaccttgagcttcagatttttttctctcatgtgcaggaaatgctgactccatcacttgatgatgactctggatttgggcattctgatcattcatggggcccaaggaattactttctagatagatctgtcatacatttaaaattttttttatatttttcctagtatagtgagggatttttcttaaaatcatgtctactctattgtcaaaaaggtaagacctcacttttttgcatattgggtaaattatgtctctgaactttcatttatttcctcagtaaggtgaaaaaacacatatcattaagatttttgtgaggattaaataaaagactggatataaatgccttccatgtagacatttaataaatgatgattgttactattactgctgccactattctactatcaatattagtacaacctattactaacaacacaaaagagcctgttcttccatggagaatcaaataactatccaattaaaacaaaaatagttaatttttaaaatagttaagatttaagctttctaaacatatttttcatgtgtattatgttggggagggtcttttgtttttaaacactaccccttgagtagttaataataacagacatgggcctgtactctgagctatatctttgatagtggtatgtgtgtgggctagaagttgggctccagtcaataaccaacaccagagtccatagtggaaacacttccgttctgtgcagcatgggtgggcaagctgaaagaacaccacttattggaagaaaggtgctacacatatacaatgaggtgttatatttattattatttctattttaaattatccattgaagaaagaagacatggagagaatttttagtgaggtccagggtcaaattgggttcagaagcccaaaggggaacatggtagttttctgactgggatgcatgtgaccttgggcaggtcaactaacctctcccagcttcattcccctcatgggtaaagcagaagagtgggactgtgtagttttagggaacttgtacatctaaattctatgattctcatcttttattctcatccatatcccctggactccctagttcactgacttctaggacccataattatgactatgtgaaagaatactctttaatccagcgatgcattcccagagtgacatgtgctctaatgtgagaaacagtaatgagagctacagtagaaacagaatccttcagtggctttggcctccccaacttgatgagatgctcattcatctcgggtgtgtggttggaacatgagtgggtacaaaaaaggtgccaaaattgctgcctgaggaaggaagtagttggaattgataccctgtgagtggggttagctatgtgcaaaagtagaccacacctagaaacagggtatagttgtgtttctaagaagactcaagaagcaacttgatcctgtcaggggactgggccatatccctcagcctggagtgcagggggtgaaatgtacagcactggtacacgaaggaggaaatggctgaagtgcagtggtctctttggagtggcttggaagcaaaggcatatttctgttgatgggacatattaggaaaggacagtgatgttagagatagttagaatgaggctcaaagcatggcttttggagcctctcatctctaactggaggccaaaagcagtggcatgggggctgttctgtcattgtttcccaaacttcagtcatttggatgccacagttaagatgtttgctgtatccacctgctctattatttctttaacatttgtattgaagttgatttgtttttattgaaatgtttattttaaaaggaagctttctatcattatcagaaaaaaaccagtatcacttgccataattagaagacaatcatcctgtctcccccccgcacaccatgaaaataaagcaatgtcatgaagtcctaacgaggttatcttacctgtagaaggctgtgggcctgaggattgctcctttcctgttaaagggaagattagaaagtgttggactcaccagcacacccagactttcttcttggagtagtaagaaagactgacagatcatagtaatgggtaaaatttgttgagtctctttttacatatcctcccattgacacctccagattttatgagaccagtgattctatcatttccatttgttttctagctgaggacatcaagtctgagagaataaaccacttgctcagagcacccaagctagctaggggtgtagacaatgggaagcgaagaaatttgactccagacctggagttcttcagcacaggactatatcttctcttacgtgtcagtctgtgctattgaatgctttgacttcatggcctctgagagcatctcaagtgcctcctacaagcatttgctgtatcaggagtttcaggaatcttacctgaaggtgcttaataaggattggtctcttctcctccccacaaccctcctgttcatgggacagaccatcctgagccttggttccagtattcaaggatgctggaagagaggtggccacttcatctcaaaacactcgtccttgtcctctgacaatcccagaatttccaggcaaccttccaatggtgacctgctttccacagtgggctttccaactggggtgagaatgaacccatcaactgatagtaacgcttgatttttggttcacagatgtaccttagtgatgggtacagggccctctatcaatatttactgaatgagtgagtaaatgtttggcagttatatttctaaaactaacaatgagattaataataaaatggctactttatgaagctcccatgctacacctgacttggtcttaaatgtccctcctgtgttatttcctcaaacaaccctatgaagtaggtgctgttgtcctcttttacagatgaggttggaaactgaagagctaagtaactgtttgatccaaagcctgtgggtgctcccaactcttgcttatgctgctcccatcagaattgcccacatggctctgagttctgatggatttggttaatgatggtcaggccctttgagcaccacctctgactttactaacaagctgagtctcgtttccgtcggccccagtttcttcatctacaaacagaatattactgaagagagcacatgaatgcacttggtacatggccagcattcaataaaaggcatttcttattatggggaggaagcaaagaggaaccgcatggggaaagagaagccacttcaggaggataatggagatggcagcaacgttctttctgttttttggtaactatggtgaaggtgtcagacaaggcctccaaatgccaatttccccctttctcagaaatgccccagagagcaaactctcccaccccaagttcccccagaatgagtattcagcacccttagttgttggatacacatcctcctgggccatgtggcccccctgctgcccgttgcagaaacagcctgctgcagctgtggcattgcaggaagttaatcccctcactcagggcggagaccagagatgggtggaacacccgagaagcacaggcaacggtggtgataatgaagagcgtgtgcgaggctgggggggccaccagggaggggcgggagggccccctggagggtgcagggaggaaagggtgctgaagcctctagttagctgagctcagcccctccagcctggacactggcagggtacagtccttcccagggcagtgtcagcaacttgaccctggcacccgaagatcccttccaccatggagtgtgaggtctgaatttgagaaagactctgttaatgtgatgtggtctcttgtctttatccatcctcattaccccacacccccgccccttttcaatcactgtatcaaccctcagttgcctgtttacttggttttgtggtttttcacttagatgtggttagagaaaggtggggtcagaggacaggttctccaccccgctccttcacccccacccaagtgttctacttggtctcagagagcagaacatgacactcttggcacagcagatagatagggaaattctgattcagtttctctggggtggggtccacgtgtaggtatgtgctctaagctcccaggtgatcgagagccactgctgtagttattgaaggtattggatgactcactgcatttagaaggcaagtcagtggggaaaaagttgaacccagctagtaagagttagcatttcttattcctgcacaaacattagctaaggaggatttgactacctagagtcttttgacaaggctctcaaaaacttattcccagcactccatggatgtggacaaagagtatatattgtccagctcattttatacctgcaaaatggcatagttagtaaatcactggggagctaagaagttatgataacaatggaatgacttagcagagatgatggtggtggtgataagagggacaagccaagacccgaaacctttgatgctcagatcattccacagttcttcagatgttattgaaccaataggtgtgccctagaataatgaattccatccaataccatctgccagatcctggaggccatcttaaacctaccaggatagcttggagggcacaaatgccacttaaggagagagaggacagagccagggctgcttcctgccaatatatttacaggagagattatgggcttagagcctcagtgagactctgtagaaagatatgaggaagtttagggatttttaaggaaatgatagcttacttcgtgggcagtgcctgtgtgctggatagtcagtggggcagtggtgtggtgtcaggacatgccaggtgcacacgtagcaggcctgcagaagtctcagttatgaaaagcgtggaacacaccatcagtgacagatggagaggccccccacccccactctcaccctgccacaccctaccccagcctcttagaccacaggtgcagacccaactccagagtttgcaacacagatcagtaagagtctccttcattgtgttatttatattttcccttccccagcaagattgcctggttcaagattcgttatccaccagcagttaccattgagaaatgatgatagaacatgaaataccactcacaatgacagctaaacccacaacatacctgggaattgacctcacagaagatcccccaaacgtttttgggaaattaacaaacaaactattttaaagtgtgtaaaaatgaaaggatgatattatagcagaataccttcaatgtaaagtaaaacatgtatactccatttttaaaaatgatatagacatattcaaggacttacagtaagtaagtggataaccctgggaagagggaataaactaggggctcatatacatagacacatatatattatctgataatacctaaacacatttcctcagcaaataatagttgctttcttgaatactcaacccaaacaggcaaaatgtgtgtatcttccatggtgcttagctcagtgccttgcatgaaaaaggtgctcaatacacatttttgtaaaagttccattaaaaataatatttatataatatttacacattatgaatgtatagcaaatttagaacatgtacattatagagagaatctagaaaatacacattatgaaaatttataaaatatcgataatcaaaagtatgttaaactcacccatactactccttatggataacccctatgaacatttctagatttattattccagatttcaattagggtattttttatgattgattgatgacttttactatgttttcatccagtagttttagccagtttgtagtttgaatgaaaaccattttgaaatgagttcagtgtacaaaatattcactatgcatgaagtgtagtgtgtgcaaggcaggagcagctagcctgggagtgagtccgaaaggtgatgtcaaggaagacgaggggtcagtcaggctcaatgtgatggggttgatcaggagagggacaacagggtgttggcaaaccttctgtaaatagccagatagttaatatttgcaggtcctattatctctgttacaactactctactgtgctgtcatactgtgaaagcagccagaggcaatatgtaaacgagtgagcatggctgtgttccaataaaacttatgggcattgaaatttaaatttcctataagtttttcatgtcacaaagtattcttctttcaattttatattaaaaaaaaaccaattcttagcttgtggaccatacaaaaacaggtggtaggctagatttggtccatggaccaccgtttgcagacttttgggggtgatgtcacaggacgaaggaaaagaccagaggcaagagaaaccttggcaagttaaagagctaatggaagggtgtgatagatcattgagtgggaggctggaggtgaggcgtgctcctggagaggcttcagacacccatagctcggctccatgtgccactgaaaggttgggagtagtggagagagatcagctggaatggacttcagaagaggatccattctgggattataccaacattcaaaccattgctcaaactatgttaggccagaaagtctggtttcaggttcttctgaactccttcaagaagaaagagcaacacacaggaaaacaatgccccgccttgagaacacccaagatttaacacaaataatcatcttgaggttggagtgtgagaggtttacataaataacttcaccaatagggtggatggtctatggcgtccttgcaaagtcagctgtggcagtctattcctccccctaccctccttataatgatactcctttctactcatttttggtctcctcttcccacatcccattggtgttgtgttcccatcactcccacttacctcatccccagctctcttgagtgcagaatcagatcaccttgcctaaatggcactgctactgtcttgattggtctcatcctgatttaaatgctaccttgaaacctttgtaaatagaggttcactatttccttagttatttcgtcccccacttcccacacctccttgtgacaccaggctgcaagtgtatgcaataacctggactggactgggcagaggaaagattatgtttactctcacttaattatattttactgaaattaaatgtgtacctcaatgaaacatgacacatcacaaaatctaagcagactgtttttctacacctagtacctgatcttagcctggtttcttgcacctttttccagatttcctggacatggtgttttggtgcaatacctacctattttaactccatctctcttccaactgcaagaaggctttggctttcagcatttggagtttaagatttgattactcatccaggggaaatattcagaagtgatctcataggcatgatttgcaccttgcaagcttgcttagaatattaagcagggggttttccaagtagacttgcctcactgtcctgtttgcaggcctaaattatgaagcaattaatatacagcacataaaactgtccagtctgtttgttcttgctgtcatatcgtcagtaatgatggcaggaactgactaatgaaccggcccaagtatctatgtacactgagaaagagagaggaagaaagggggccagtggcagagagcacgcagaacaagtataactcatatttctcaaagagcacgactcttccatttcctaatgcttttctcatgaatagtttgggtctttttttttttaaagtctttatgaaatttaagccctgtttcccatttcactgaaaaacctttaagaaaagacatttttcatacttaagactttttcaaatctctcctaaccagttacactctgtattgtatctttcgtagctggcagccatccagcgacaatccttaaaaatccctttacagttttagaggaaaatacaagctctcatttaccactggatcgagtcagaaaataaaagcttaatgccttgacaggcctggatatttttttgaggcctaagtctgatttatggcagtagccggcaaaccaggctggtgaaatatttgctgctgctcctagggatatggaaaaatgaagtgtgaagttctggggagagcaggccacagccttccagtcactaaacactcccaccaagttggcaggggaacagagccctgggctgcaagatgaacctcaaaggaaaagggaggagaaaaggactgcgcaccgtgtcaaaatactgccaaggcttaacgctcaccatacattttgtgacctggggtaggatgtttatgaggggggtttagggaggaaagagaagagaaacattttcttccttctttatttattctattttctttacagcttccctgtaggggtttcagtccaagtagaagaaattaagagcaacaacaggaatgtaggaagttgcttaagcccccatcataaaattgttcagatcgaaaaatatgatctggttagaaagaaagcactggcctgccttagggcttgcagcttcaaggtggggtgacagacccacttccccacaccatgggtccccagatctgagagcatggaagttgagattttcattcccatgaaaagggaatttcctagaggtagaagtgaggtgagttttctcccctagaattttgttgaagtgagtcatcacaaatgcacaagccaggcaaaacacttggtgtttttattttttctttcctttatgtaaaaaaaaagtatgtatatatataaaacagttaatatccactgtttagatttgtttttaattttaggtttctgaagtagagtcttggatacccgtgcttgtctcaaagagctttatctgtacttggtgttattcacagaggagatgagtggagcccccacagaaaagcaggggttgattttagttgttttctgaagtgcaaaaaagttctcttctagttgatatttttgataaacaaaggcaaaaaagggcaaagatggaaaacatgcatctcattttctcctcacacgaacttatcttcggaagatcagtttcaaaatctgattcatttgagggttgaataagggttttttttgttttttgtttttgtttttttttaaataacagcacttctgtctgctaggcagagatttatgttcctgtgaagtcttgggtcagttaaagccgtctcagtaattacagaaatgtttatatccatgtgcagtcatcccccttcccctcactaaatcactaataaacacacctactctcactcaaacagactcccagactcacctaacgcccccacaaaaactatctcactcatttactcccttatcacaaagttaaacgtagaggtaattcaagtcaataaatatttattgatgcctaccatgtataaggcactgttaggcaatgcaggggatcagggtcgggggctgcgggtggaatacaaaagcaagattctggtcccaggcttcaagatatttgcaatttaatggaggaggaaactggactttgatccatttgccttttagtaaaacctacattttaaaaacaataaaatgtgcctttgttttttctacatggacagagaagaggaagaaataggggtctggagaaacggagcggacttacttgccccatgccacaaacagtaatagcaaatatgattgggcttgtcgtatgtgctgggtgtgaggcttagcacttccgatgcctaatctcattcagttcttcacaattcactgagaggtaggctcatccttcaacagatgagaaaactgaggcaaagggcagttaagtaacttgtctaagattatagagcaaggaagtgtgtggctgaggttcacaacccttttcagaactctcttggtcccatcattaacctgagatttaaaacttttgtctccttcctcctggtccagtgattttcctatctgtctctggtccccaagcctgtgatgatgagttggaatttagaaaagcaacaacaacaacagacacacacacaacattttaccttttcatttattttgaaggggcttggagtgcagaggctatggagtgctttgcaaactatttttgtttatttgaaagcacctagatttcagccttaaggaggtttgtaaatacttgtagaaaaattgaagatggtcatttcctagccatccttcttggaaaaaaatctgttttaggaaactgactaatccagggcttgtacaagggtgaccagacctccagcgtggctgccctggtttttggtaaccgatgtgctgaaagagatcatcaagctctgaatttcctcaatggtgactaccacacacatacaggccttaaaacacatacccacagttcaaatattttagcaaatgtcctggctttcctccaccactaaaatgaaagtgaaggtgaaatcatttgggggccactagagtagaattcttacccttgatagctgcccatagatttaaatgtctcacaggagacccaattaaatattagtgagatcccaattcaccaaaggatcatatttcctggccattttcatcactcacacttcccggcaatttaatgatgagtttaggatatgacctcttccctcaggctcccctcctaccttttttattttcttttattttggatctggaatctagatggctcaagcatctggaaataccctacataggtttttctaaccaagtcaccagttgctgtctgtacatacccgagttttgctgtgatatgaagttgtcacaaatgagggctgataggagtctccatattttgatggcagtgattatccaagatgacccctagaatgcaaggccaagggagcacacatagcactgagcgtcacacaaagaggatgtttgttgagtgaataaatgagtgaggcacccttggtgaggcctcttgcttgcagcggctagaggaacagaggcagatattggtacagcaggtgtttctcactgctttccccagaatgacccccagcttgtgtgtttgatcaagaacagccatcttcacactatggtgtgtatccttctggggagtgcctgaagatttttcgggggttatgcagatgctggtggctttaatgctgttgattttcagatgctcaactttcatgcgcaccctttcctaaaactcaccatcctgagaacacaccacttgtcactctttcccaccatcccttcacagttgcccttctcacacttttaaaataaaaggcatcctttcactcatccccctcccactatagagcatttcctcagggtctaaatatcctctgggtctctaaacattggggacatgggcctggcatggtgactcaagcctgtaatcccagcactttgggaggccaaggcaggtgaatcatgaggtcaggagttcaagaccagcctggccaacatggtgaaaccccctctctactaaaaatacaaaaaactagctgagtgtagtggctggcacctgtaatcccagctacttgggaggctgaggcaggagaatcacttgaacccgggaggcagaggttgcagtgagcggagatcctgccactgcactccagcccgggcgacagagtgagactctgtctcaaaaaaaaaaaaagccaaaaagcgtgttagggggaaatactgaaagggggcagagcaccattctgtcccgtggcaaactcctggcaagcctccatgcatgtatgtagtgtcataactatccatctacccatttatccatctgtctatcaggatgacacttcagaaatgaattagttgccctggggagacatattaacacactcatttgaattggaaaatgaagttagaatttctccacgagaaagtgagtatgatttggctaattggattgacagtgaggactgctttaccatttaggtcatatggcagacataaacagaatcacctaaatcttttgcaaggaagttttgatgaaaatatagctaaagcataagcagagtgcacaggctgtcaggtggtacatccttcataacaacctaaacatatgttgatgaaatttaggtgtcttcttaaaaatgtagttaaaaaattattttagggtatacacaaacaaataattcaaagacctctgatttagagaagggttagagacataggcaaggaggaaactcattaataggcagaaaggtgctgtgggattggaaaaatgctctcaaaattgtagaaatctgaaaagaggtggaaaagaattaagagaccctgggagagaagatcctactgtcagcactatgggcgtgaattctgacattgtgtcatcttggtgagctgtcctatctagaatgaaaatacccaaatcactcaggttcatttgtttcatccatctgaacactctgaaatttactttccttttttaccaacttttaccaaggtcataaaaacagatgtacaataatcatgaacttgtcagtctttttttaaagctagttagcaagagtatgactgctactaagaagtcattgttgttatatttagctgttcttccaataatagactgtgacagtatattatacagatattaagtaggtgactctgaaatagctggggcaatgaaagtgctgaataccagtaggccaagttgcccacaaaagtatttatgctgaggttccttaaaaggaaaacacctcataaaacagatacacttctaagaatctgtgagaagtgcccaacacgctacaaaagatgtgctatttagtgctgatgttatgccagagattgcagtgtttagctgcctaatttactgctatctggccttttctacaaccccattaatctgtcagccgaatgagctctaattatgcatcttgtaacctggtgtgccatagcatactgcattcgaggggggatagatctttaagatttactgcacaattgctgataatctcatggggtctctcaactggggggaaattcgcctcctcccaattactgagaacgccagtagaggcgcagagaagcagatgggcatggcagaagaggctgaagtttcagccagtgattcagtggactcttaacagcctgacaaaatgcaaaatacattttagcatgttgctttaacctagaccatgtaccgtctagaatatatagtatactcagtttgtttgagagcttattagaagcactactccttctgctgccaaactcatgtgttctgcctccttctgtggctggcccattttctggatagatgtggcagtgaggaggagaaaggaaagggattaacagggaactgcctttttattatggatcatcattattattttttacttagatcatctccttggatcctcatcaaatcctatgaggtatacactgtaatcccaactttagaaatgaagaaaactgagtcacagagaggttcagacttgtgtgtttgcatgtgtgtatgtatgttggaggaggcatgcaatcctgtagcctccaactccttggaaaagctgaatgcctcaaattcctttccatcagcttgctttatcctagggaagtcattgatatctcctaacataggctttacggatttctgatttgtgttcctatctatactgctggctttctctcccatcctaccacctacccgaaggttgtagggataagtcagataatgcccataaaaggcttttaacgccttaggaaaaagttgcccacatacaaatactgtatcctataatgtttctgtgtgggttcatagccccatccatcctcaaagaaccagagacagtcttagatgaagtggaatcatctccagctgctgccgggttcattccttctggggtagacagttgtactggcttgactctgcagtgccatggcacccaaaaagatctttgcagagagcaagaagaaaaaactctgtttacaaacacttttactaacttttcttttttttttgccattcatccctaacttgaccagtgtcacaccagtgactttaggtggtgtgagtttgatcttcacatgtggccatgatacagggttattttcaattttagcatgaaatcttatttgcttttagtctaatttcttttaggctcaccttggttttgctggcatagaaagcaaatgatttcacttcattgcaattcgatggactaaataaaaaaagttaaggtgctggtgtttggttgaaactcaggcaagcccccagtggtggaaaggatgttcaaatgactccaaatgtacaggactctggttttcatgggctaccctaaattctctgccagcagccctgagttccctttgacctcatcggaaactgagttctctaaacagaaacggtaaccatgataagttgtgtcactttggtgatatatctctcagaatattataaactgggtagcagaattttccattgccttacagacatccatagccagagatctaaggatagagagttcatgtctctctccattaagaaatttaattcacattttactcagtctcagcctttgattaatactctggatacctcatgcagcagtccttaggattacaaaaagtgatttgtctaatctgcgtgtcagtctcctttggagtctacataggggaaaaaacccaaaaccaacactctgtagctattgatttcatagcatttgctcagcgtttgcctttacattctggccaagtcaagtggataaagagcaatttgatccatggagtgtggcgggagtgttgtcaccatctacagaacttattcatctggaggatttcaagttgcacatatcagctctggaagtgggttttaatgaaatcactagcaaaatgaagttcatataaaagtgaatgtaaaaacatatgctatggttccagctggctggcagagatgtagtcaagtttgcacgggatttaggtccccatttctgactttcggccccaaggaataaattttggatgatctgagtcaaggctagactgaaggacaattgtaaagatcaaatgtgtcatgccacttttctgaacgtgagcttgccctcctctcattcgcttttcctgtctcagtacccatggactcatttatccaccatggcaaaatctcaacttttctacctttcttgtccataaatcaaatttccccggatgtaaattgatgttatcttagagccactccttcttccaaagggatgcctagccaagttgatgtgtgcatctattgaaatagatgtggccaccatgatacatgtgttttaccagtcacattctggagactatatcttaacccaaagtattaaatggggattttaatggtagtcaggaagaaatgcttgagcaagtagggcttttacacactttcgtattagaactcacatagtagttgtttatatctgataaacagatttggcctgcctgaagggggtgtatcttgcaaaagtcttgctttaactggctacatgaaccagagagaggtatggagacacagagatgagcagaatatggagcttaggcaccagggaggttggatggggaatctgctcttctaatttgggaagggcaggtagggctgaaagagtcttgcaagtcaccccctgcttttacctaagccatactatgaggagaattgaaaaacaattagttgttgaagaagattatgtaatcttttgagtaacaaactttaaagcatctcctgaatccttgaaagaagtgagatttttctgatgaaataaaaatatacttccattgctttgctttgctttttttccttcaatgaaataaacatttagtgcttatcagcaaatgttagtatcacttcatgtagttaaagattgctatttttagcccctctctagaccaaattgtccctcatgttagttttctccattgatttatagttctaaatctttcattatttttattaattttctcagggctctttccatgtttcccactttttttttagcaggatgacattccaattgagggagactattgaactatgtccaacactaggccttagaatctgaagtctgtgtttgaatcctgtctctagcacttaaaacatgagatgttcctgtgtctcagcttccacattttcatagtgggcatgactaggtctcactcccttctagtattgctatgaggattgcatttgaaatacagtagcacattgcttggcatctggaacatggggtgtacatcataaaaacaacttttatctgcatcatcaacaccaaaacagagttaccagaaccatcaagacaatagtgttgactcctaaccttgtcaagatatgcaaaattcttcaagatggcatctctataagagggtgcatcttcaaagaatcaggaacaattcagatccctggtgtagaatccacaaaacactgtactacctttgagaaatatgagtcatgacttccagcaaattacttaatcactctgaagtttgtttcctcatcatatattggtaataataaaattacctcatagtatttatgaagattaaatgaaatatagaatggagacttgtggaacttctggaatggtagaatgagaagcctgtccaacactccccaaatacaacaatgaaactggacaaaattgtaaaaaacaaccattttgggactatgaaaaattaactaaagatacacaacaaattgagaagtatttattcattacaaacagcagaaccttaattaagaacaaagggagtctgtgccacggtagactgggactgctcctacctccccaactctcactccagctccatcagcgcggtagttcctaacagggcaggataagccataaaacccagcaggtttgctgctggagggggttgacttgctttggagtgaagtgcaggaaaaccctgttaaaacagtaaccatgttggtggcgaatgaataagaaaggccaatacagcagccatcctgagtttgtaattctggttcagggaagcaacagaaaaggcaacttgccccaaaagaacaggaagatccaaggagtgggatagccaccgtggccattgataacatttttggaattgtggaaggctgcacacagatgcaaggctgtgcacacactcagtagtgaccagagagggccgtgattatccacacatctctggctaaacattaggtataggaagttaggattaaaaaaagaaaaaactttaaaacttcagcagatacatcagtggctacatactgcaggcagacagactctacagaattaatccaaggatgtcaccaaccaaccaaccaaagcagcaacaacaacttttgaggaggaggaatcagaatcgagactggctacaatacattaactgaaatgttcagttttcgacaaaaaaattgtaagacatattaaaaaaaaacagaaaagtatgatccatacatagaaaaaaaaagctgtctttgagaaaatccagattttggacttagcagagaaggacctcaaagaagatataataaacatgctcaaagaactaaaaaaaatcatatttaaagaatttaaggaaagtatggtgatgacacatcaaatagagaatataaatgaggagagaaacgtataaaagaatgaaattctggagttgaaaagaacaataagtgagatgaaaaattcactagaatccctcgacagcagatttgaaatagcaatagaaggaattggcaaacatgaagataaatgaacaggaataatctaaactgaagaatagaaagaaaatagcatgacaaaatgtgaacagagtttcagagatttgtgggactttatcaagcatacgccatatgtgtaatatgtgttccagaaggagaagcaagagagaagaggcagaaaaaatatttaaggaaataatggttttatagttccaaaatttgatttaaaaattaatttaaatatcaaagaagctccacaaacaagtagtatgagaaaaaaaagcattatacctaaacacgtcatagtcaaactattaaaagatagagaaaaacttgaaagcagcaagagaaaagcaacacattaagtacacaagaataacaatgtgattaaagttgaatttctaccacaaacattggaagttagaaggcaatggataacatattcaaatcctgaaagaaaaatgtaaactgaagttattatattcaagaaaattgtccttaaaaaatgaaggtgaattaaacacttacccagaaaaacaaatattgagagagttcattgctaacagacctgccttacaggaaatattaaaggaaatcctttaggctgaaaggaaatgacaccagagaataacttgaatccacgtgaagtaacaaaggacactggaaaaggtaactatgtaggtaaatagaagaactgtattatatatttttctcttttcttctcatatcagatttaaaagatcattgtgtaaaacaatatttataaaactgtattgttgggcttataacatataaagatttaatgtatataataatagcacaaaggaaaggagataaaatggagctatatgtatgggaacaagttttcaatattgtactgaaattcagttagtattaatccaaagtggattttgataaattaagatacatattgtaatccctagagtaaccatatgaaaatatttttaaaaatagttttaaaagccaataaaggaatcaaaatgtcatattagaaaatacctatttgacacagaagaatgtagtaaagaaagaacagatgaatttaaaaagccatgggatttatagaaaacaaatagaacatggaagatgcaaatccaagcatatcagtagttgcattcaaggcatatgatttagacacttcaatcaaaaggcagtgattatcagcctggaaaaaaaaacaagatctaactatgtgctactttcaagaaacacaatttagattcaaagatacaaatagatttttaaaaatggaaaaagatacactgtataaatagaaaccattagagagctagaattggatcgattaatgtcagatgaaatatgcttttagacaaaaagtattattggaaacaatgaaggatattttgtaatgataattagatcaattcaccagggagataaaaaagttacaaacttatgtacacttaagaaaacagtcccaaaatatatggagcaaaaatggaaagaattgaaaggagaaacagataatttgacaatagttggagcatttaacatcccactctcaataactgatagaataactagacagaaaatcagtaaggatttaagaagacttgaacacactattaaccaacttgacctaaccgacatctatttctatagatgtatagaagtccacccaacaacagcaaaatacacattctcttcaagcatatatggaaacgtctccagaacagactatatcctaggtcataaagcaaagtgtcaatgaatttaaaagcatttaaataatacaaggcatttctctgaacacaatggcattacattagaaattaacaagagaagtaaatgtgggagatctccaagtgtttggaaattgaacaacacatcacaaaggaaataataaaatatttttaactgaatgaaaacagaagcacatcatcaaaatatatatgatgcagctaaagtgcttagaaagaaaaaatttttaaataacagttttattgatatatacttcacatactgtataattcatccttttaaagtgtacagttcaacagcttttactgtattcaccaagttttgcaactatcatcagtcatttcagaacattttcattatttcaaaagaaaccctatacccattaccagtcactgcctattgcctccttcccccattcctttgcaaatacgaatctaatttttattgctatgcattgcttattttggacatttaatataaattgaatcattcagtatgtggccttgtgtgtctgcctcctttcacttagcataatgttttcaaagttcatccatgttgtagcatctataagtatatcaatccttttcatggcttaataatgcattgtatagatataccactttttttttaatccattctttagttgattaacatttgggatgtttctgctttttgactattatgaataatgctgctgtgcacattcatgtacaggtttttatgtggatatatgttttcaattatttgggggcataaacctactagtgaaattgctaggtcatgtgggagatctatgcttaaccttttgaggaactgtcaaaaagttttccaaagtgactgcaccattttacatacccaccagccataaagtatatctatgaaaatcccacagactcaatggtgaaatacttcctaaagtaagaaataagagaaggatgttctcatcactgctattcagtattgtgctggaagttttaaccagggaaattagatgagaacaagaaataaaaaggtaaaccagattggaaaggaagaaataaaactatctccacatgcagatgaagtgattttgtatacagaaaatcctaggtattccacagaaaagaatgtttagagcaatggaactagtccagtaaagttgcaggatacaatatcaatgtataaaaatcagttgtaattctatacactagccatgaataatccaaaataaaattaagaaaataattctatttataatagaatcaaaaaaagaaagtacttaggaataaatgtaactaagggagtataaagctttatagtaaaaactataaaacgtggatgaaggaaattaaagaagacataaaaaaatggaaagccatttcatgttcatagattagaaaacttaatattgctaacacggtgtattagtctgttctcatgctgctaataaagacataccccaaactgggtaatttataaagaaaaagaggtttaatggactcacagttccacatagctggggaggtttcacaatcatggaggaaggcaaaggaggaacaaaggcatgtcttacatggtggcaggcaagagaatgtgtggcaggagaactgcactttataacgggcagatcagatcttgtgacacttattcactatcatgagaacagcataggaaaaacccacccccatgattcaattatctcccactgggtccctcccatgaacatggggattactggagctacaattcaagatgagatttggatggggacacagccaaaccatatcatggctatactccccaaatttatctgtagattcaatgctatctctatcaaaattccaactgcctttcttgcagaaatggaaaagctgatccttaagtgttccttggattattgcaagcctttagttaatttagagttctgaaaaaaattcattttgacatttttgccaacgttctcagctttatagaggaattgactttcaaacgtcctttcttaagagggtccatttcataagagggaaatttataaatttatgcatctatatttgagaagaagaaagatctcagattaataatcttagttcatatcttaaggtactagagaaaagaagagaaaactaagcccaaagcagagggaaggaaataatacagattagagtggaaatgaatgaagcagaacacagaaaaacaagagagaaatttaaagaaaccaaaagttgattctttggaaagatcaaccacactgacaaaacggtagctagactggccaaagaatgaagagagataagacacaaattaccaaatttagtgatgaccctgcagaaagtaaaaggattaggagatactatgaacaactttatgccaacaaattagacaatttagttgaaattgataaaatcttagagagaaattataccaaaaccaactttttttttttttttttttttttttgagatgcagttttgctcttgttgtccaggctggagtgcagctgcactccagccgcactcgactcactgcaacctccacttcctgggttcaaatgattgtctcacctcagcctcccaagtagctaggattacaggatgcgccaccacacccaactaattttgtatttttagtagagatggggtttcaccatgttggccaggcctggtcttaaactcctgacctcaggtgatccaccccctaggcctcccaaagtgctgggattacaggcatgagcctccatgccagggccaaaaccaacttcttagagaagaaatagaaaatctgaacagatctataacaagaaattaaatttgtaattaacactcttccaaaaagaaatatggtagggaagatgcctatcaaagtctttggcatagagttggccccaaataaatgtgagtccattccctctggccctttcagacaatgaggtatcaaagccctgagcaaaacttctctcctctgttgaattctatggggacctgctgtacccactgatgtaattttaagagctaaaagttacttatatgtggggaactcactttagtgctaattttaaatgataaacgctaagatcatggatcatgcaaaccaagatatcttgacctcaaccagattccatcatgagcagggtcagtttttaatgatacttacccacaataacctccacctcccccaccagccgactcagcacacatctaccccgacacatccctaacaacacatccaaacaaccaaacaaaaactcttaaatatgggcggctcttttttttccaaagattgtgatctgggagggacaagaaaaggatcgtatttctttttttttctttctttctttctttttgttttttggagacagagtttcgcccttgttgcccaggctggagtgcagtggcacaatttcggctcaccgcaacctccgcctcccgggttcaagctattctcctgcctcaacctcccgagtagctgggattacaggcatgtgccaccaggaccggctaattttgtattttttttagtagagacggggtttctccatgttggtcaggctggtctcgaatgcccgacctcaggtgatcctcccgcctcggcctcccaaagtgctgggattacaggcgtgagccactgcacctggccgggaaggatggtatttctagttgacagatgaagaaactgaagcagagagtcaaagatattatgacactatgggaggtacagcgactacttaaacagttatcttagttttccaattagtacaacagagaaaagagacaaaggacctagggtctaggtccagcttgctgttgatttttgtcaaactgtttctttctctaggtctcaatttcctcattttaaaaacaagacactagtccttgaactactgtgaggactgctatgaagagcagtgtctgatcctggcctgaaggcatgctgtgtttcttgttcgtattcttctaagtgaagctgattcaagggaggtttgctgtgattgtgtaattgtctgtctgagaatgggcattacaattagaaaagaaaagaaatatttatatcaatgagctaaatccccaacttaggaagttaggggaaatacaagagtaaagataaagaaagtagagagaggggagaagtaatagtatcagaagggattaatgaaacagaaacaaagattcaactgaggattgtcgaaagccaaaagcttgttctttaaagactactggatatctgcagaaaaattaagcatgaacaaaccatgaaaaaaaggacaactataaacataagagtttaaaattattgggataacttaaataaccttataccataaagttgaaaatttaagtggacaatttcctattaaagcatattaccaaaattgactcagaaataatacaaaaccccaattgacctataactattgaaaaaattaaaaggaggtctcttctagccctagtggtctatgaaaacttcctttcctctctcgctttctctgtccctctcttcttctacttctctgtctgtctccgactctgtctccctccttctgtctctctgtctctctctgtctgtctccctctctctttgcgtgagtgttttgaacatgcagaatcaacgctagaatagtttctacttggagtgactatctctgcgtgagcaaattagatgtgtgttcagtgggaagtgttatgtctaatgccctctaaagagcaggcagttgtgtgtgggggggatttcttttaggattggtgctattgcagggtgtgggtgtgggagtgatggcctcgctgaagttttcatttgaggcaggcagagctcctgttagttcctagctcctgaaatgtagtagagggaagagcagtggggaggggccgtggggcagagttttatgtgtacctctgaggtgtgcacaagaaggcaaggacaacaggttggggacagagtctgaaacctctcaacttctaccccactgctgcaggctcagcaaggatgaacatattctgcacctggcttcacactatgtggctggccagcttttctcaggccagtcattttctgtagaaaggcatacttgggagagttttgtttagggtaagatgccacagtcgaaccaaatggccatgtgtacggctggccctttagagactttctgctctgtgcagggatgaagcgggaggtgggagggaatcctgtgaggtgctgaatccaggttttcccttgtggaattagggagaagattatacataaccccttcacctcatctcaccccctctccaggagactgtaggtgcctgaaatgctgaaattaacttttgtttcttaagttgtattccctaataaaacaaaacaaaacaaaacaaaaactactttctgataacatatttttacaggaaagaaggaggtttaattaaccagatgctgtgccccttcagtgaggttgggactgattgggaagttagccacaaaagggacatgagtacaggtgtcaaggagcacttcattgtttaggggaggactgtccccaaaaagcttcctgctcactgaaatgctcccaggaaagtggcttgctgaaaatggatcatagacatgttttaatccaactgctgtttttcaggttaagcaagataggtttcatttgattgctttttgcattttcttttttatcttagataaagggtgtgcctggtttttctgctgcgaacaatggcctgattgttagaagtcttgcttacatgtatatatgtgtgtgtgttttgccatgactcctgtgttttggaagtctttggggacagatgatatttatgaatgatgtcccaagggtataatcagtatgactcattcttggaaccagttttatccgttaaggggtgccagctgcacccagttcacaactgaacatactcgaaacatcttcccgcactaacctactcctggtttggggtcagaaggacatattctagtagcttttctacttctccaggggtttaatttcccatgacggggtcctggggactttctgttaagaattttgacaaggtgaaaactgttacatagttgagaatgaaattgtgtttcaggatttcagaaaacacccccacaggaaattttatgaatttcatcataatagcagtcataaagaatcctatttattctctgtcattctttaagtaattcagaagaatgtcctgatgttatcgtctctgaatttataggacaccagtgaggctggcagggtggatttcatcatctcttttattctgcctcttaccctcccaacaagtcaccttgaaaacgggggttactgaggcacacattggtcataggatgttcaaaaaccactacaataaggcagggtcagaattagagaccacgttttggtttccgggttagaaagctttcattttaaattccactcctatctagtcaagccggagttcctgatggcatctgagacttaatttgagatgttgaggtgtgtcctgccatgacctttactgagggctggctttcaacaaatctgattggctcacttctcctcaacccagcatcacctcatctcaaaggcattttcagttctctaggaggcacctgttgctccttgtgctttgctttcttggcttttcccatagatggcggtcccggagcacgcggatcagcccagtcgtggttctctgtctcccctgccatgttttctggtgtcttcatgaccacaaattattggatcctgggaaattgccctgttttcactttgttcacccattttgccaaatcagacatgtgaccagtctgtggattaggtaggcaatgccctccctttttttttttttttaacccatctttgaaatagctgtctgacctcgtctctgggagagaagacatgtggagtgtggaaacacacttcaacctgcacatctggcggaagaacaagagtggaattcctggatcagtttcttggtttgtggtctctggggattgctcgttgagtaactccacatcacatcacttcacagataaggaagatgtcatccccatggcatctctgatttcggcacacgcttcagaaaacccccagcaactcatctagaacatgatgttttaagctgctataatcaccagccaactttgaacatgtgccatgcacatgacggccttccttcttgcctgtgaagcttgagtatgagtctgccttagtgcactccctttgtccagctcctattgaaggtgtcagtgctggaccctgggatgcagtcctgagccatagtgcctgcaggatggaattcttctggcaggcccgggctgtggacctagtacaacaccaggacttcctggaacaggcactgagtggaggtcaagagcccttggttcgttcctcccctggcacaatttgtgagatgttaggcatgtcccctctctggggctaagtgtccttaacagccaaatgggaataattaatacttgtcttacatgaggctgggaaggatcttgactattttggaaaatggtgtcaggattcaactgagccaggctggaacaatagatcaaatgggctaacaagctaaagtttaatggggagagatttaatgtcccagtcatgggctcagaaacaactgtaccagtcaggaatggggaggagctgaataggcaggagcacatgagggtgagtgttggacgttgcagttaatggcaacacagaaatgaggactctggaaactccaagtgcaaacaggctgcattagtagaaatgcagttctcaaaacaaggaggtaatagtcacattggctagactagtgctgaagaactgggctggatttgggaccccaccttaagagggcaatgaggtcccagggtgtatctggggaagactaaccagcatggtgacaagtatgaaagcctggggcatccagggatcagcagacagacttgaaaatgttcttttccttcctggaaagggttcatttagcaggatctgatcgctgcccagagaaccaacctatgacaaaaaagcaggaaagcagttttttgttgtggttgttcagactggtcccccagcttttaaccttgtctcctgacagcagccagagaaattcttattaaatatagcatacattcacatggttcaaaacccaaccaaccaaccaaaccaacccaccaactaaccaaccaaataaataaatacataaataatgaaccaactaaccaaccaaccaacctaactaacaaaaagcataaagacaaatacaggacaaagcctccctcccacccttgtactctagtagggacagtttgtgatggtccttaagagtgtagtctctgaaagctgtgctgcctcagtttgtcccagtcctgctacttcttagctgtgtggcctttggcaagttacttaacttctctgaaccttagcttcctcatctgaaaaatggggataataatggtacttatctaataggatcgttgtgagaattaaatgagtacatccacataaagtacttagaacagttgctggcatacaatcaatttcacaaatgtcttagctctcatttttctctgcttagttctcccctttctccagtattcaaccattatttttatatttcatctgtattttatcagagttttaaaatgcatatattatatatgcaaatgtgaacgtcaattcttatttttcttattttttaagttccaaagctagtatattagacatattgttcagcacctggccttttttttttttttaacttgatagtatatcttggagatttttccacatcagtacagagagaacttcctcattctttttcacagctgtacatataaggaagaagtttctaacaattagagcttgttttaaaataaaactctgtcagaggaagcattcaggtgaggaatagacagccacttctcaggtacgatggagtagagatttatgtgtcagtaaggcagtcaggctagaatatttctactgttcctccaactgagatttcttgatcctatgttaagttttccaaagaatcacagaagaattaaaacctgtctagaaacagtactgttgctttgtttatctgactggattctgacctggggctcagccagcactgggtgagggggactttaaagaggccctcttgcagggcccatctgtgccatcttagaaagcaggtggctctgagacaaggtccaggttgtcctctaaccccacctaaagctaacctggcccaggtattattacctggagggaagaaggactctgctgcagggagacctcgagccacccgttggcaggcatagtctcattgaaatgtgttttcataggacactgagtttatccctcatttctcagcctggaactcaccattgcaggtacaacttcagtggagaccagcatgactgagcttccaacaggcagcaatgactccagggctcttctactacctgccctttctgagtgttgaattagaagggaggtgagagattagctcggcttccctctaccagcaggccaataaccagagggtaaaggtctccaactttgaacatgtgccatgcacatgcagaaggtaagtgattgcaggagattgtccatgtggtggtaaggtcccccaagcttcaacagagcctgaaatgtcctttctagacatgaagcattttgagtttttttattctgccagtctataaaaaatccaggtctttttgaaagaaatagcacaagtattttttaagcacgaatttttcaacctgagtagctgagaatagagctcctcactgggcactcggacaaggaagcaagacggagtccacatgggaatggggcatgagaggtgggaaggttattggggtctggccctggcttgggccagatgggaccagattctaaatggattcactcttgtttacttgttaggattcttagcagagtctttgctgcagcagcagtgcttaatgggggaggtgggggagaggcaggcatgagactccctcccacaatctccataaatacagggaaagccatggtgaatcttgattatacactgtctattgaaagctccccaaggagaggggctatgctttatacttttttgaagtataatttacaataaactacaaatttttaatgtgtacaatttaaaaagttttgacatgtatatctacccttgaaaccatcaccacaatcaagctaatgaacatatccatcaccccaaaagggttccttgtggccttttataatttctccctcctggtcctccttgattcctccttcatccctaaacaatcactgatctgctttctgtcactatagattagtttgccttttctaggattttatataactggaatcacagaataagtattattttttggtctggcttctttcactcagtgtaattattcagagattcaactatgttgttacatctatatagttcattcctctttactgctgagtattattccactggacaggtatttgacacctgtttattcattcacccattgacaaacactttggtcgttttcagttttgggctattacaaacgaagctgcaatcagcattcatgtacaagtctttctgtggacatacacttgcatctttcttaggtaaatacctacaagtggaatgaattatgtggtagttgtgtatttttttgtatttaactttttaagaaagtgtcaaactacttttcaaagtggttgtactattgtaccttcccacccagcattgtatgagagcttcagttcctccatatccttgtcaacacttgttatggtcagtctttttaattttagacatgctaataagtatctaatagttagtggtatctgattatgattttaagttgcattgtgtccttaatgtacattttcctaataaggactggcaccttttcatctgtgtatcttctttggtgaggtgtcttttaaaatcatttgcccaatttcatattgggttgtttgctttgttatcatttagttctgagagttctttgtatattctagacacaggtctttttttcaaatcagctatgtgacttacagatatttccttctagtctgtggcttgttttatccattttgtaatggtatcttttgaagagcaaaatttcttaattttgataaagtccaatttataatttttcttcttgtatggatgtgcttttggtatcatatctaagaaatctttgcctaaccacaaaatcacaagtatttttcccatttttttcttcaaaagttttaaagttttaggtctataagccattttgagttaattttagtatatggtttgaagaatggatggaattccattttttggcatgtgagtatctaattgttccagcaacatttatggggaagaatttcctttctcctctaaaaagcttttgcacctatttcagaaatcaattggccatgtatttgtggggctatttcttttgtaagcttgaaccctactctgtcatagccccagctcagggccagcacatggcacgtgtttaataacagctcggggatataacttgactccagctgttttcaggagtttctcattagatgcagtttagtgctgctggttttagggacagtaatgcagtgaggaagtcagatggcgtgaacgagcagcagtgttctgttagtgctgcgccagcacatgctggttcttgttcacagtgcacccaatcgtcagcactaaataaatcagggtcagcctgagttcctgaaagactctatgggaataaaccttcccaccaagccagcaagtttcagaaaccacgcctccagcttgagaaacgtgggattaaatcatcaaaaatgccgtctctagcaaaagtcccttgatctctgttaactctccatagcagtgctgttcagtagaaagcaaatgtaagccatatatataatttaaaattttctagtagatgtattttattttttatttacttgtttttttgagacagggtttcactctgttgctcaggctggagtgcagcggcataattatggttcactgtagcctcgacctcctgggctcaagtgatcctcccacctcagcctcccaagtaactgggaccacaggcatgcaccgccatgcctggctaattttttattttttgtagagacggggtctccgtatgttgcccaggctgaactcctgggctcaaatgatccttctgccttggacttccaaagtgctgggattacagatgtgagccacctcacccggtcaatgtattttaaaaagtaaaaataagcagatgaaattaattttataatatatttttaaactcagcatatataaaatattatcatcttcataattagttgatataaaattattcattagatattttatatatttttgaactaagccttcaaaaatctggtgtgtggtttatagttatagcacatctcaattgaaactacccacactttaagtgctcagcaacaacttgtggctagtggctgccgtattggagagcaccacttttaatcacgcatcacatttcttgctttaacacttcccctttcttaaaatctttattgaatgggaaagtccttccctctggacatcagcttctcttctccaccataacctctcctgttgcagaaagccaaaatcagaggagggggaggagaagcaaaacatcttgaagatggaaaagattaaaacaaaatctgctgggcatggtggctcaggcctgtaatcccagctcttagggaggcagaggatagcttgagcccaggagttcgagacctgcctgggcaatatagtgagactcggttctctacaaaaaggaaaacaaaaacataaaaacaaaacctaagttcaggtaaaacaaaagctcatgagtcaggttgtatttacacagcaagatgagtaagaggtgatgaggagggctcagtggtgcaatggagttggctgatgctggctccacaaaagcttaaacttttcaggaattttgcaagccagttgttaaatacagacattaataagaattaagttatacaaactttccactgaacaaattatattgaaaacatacaaaatattcaaaactcaccatatccaaattctgttactgcatttcactattatctatgcttttgaggttattgatggctattccatctgaatggtggaaatactatatgatttcatactcttgagcatctcttcccgacttggtgtcatagcttgaaattggtaggggtatttacaccacaggaaatggtaaatgctaaaagccagggctttcatccaagatttgccagatgctaacccttcaccagcacacccctaggaaagctccaggaggtgtgaactcattgagatgagggatgcctgacacattataaatgttgaataaatggttgttatgattacagtgattgaaagtctgaataaatcctatccctgtcccttttccctgtccccactcacaagaggatgcttttgtgtaaaacagcctgcattgttcctgtagtttttttttccattcacctctactctggactattccacattcagagttcaagagtgaagtcaagagctagcaggtacagccgactctcagtgtggtctaggtcatgaatccctaagccctgggccacggaccagtattggtcatggcctgttaggaaccaggctgcacagcaggaggtgagtgagcatccctgcctgagctccacctcctgttggattactgtcagcattagattctcataggatcccgaaccctattgtgaactgcccatgtgagggatgtaggttgtgcgctctttatgagaatctcatgctccccactcagctctgtctgtggaaaaattgttgtccatgaaactggtccctggtgccaaaaaggttggggaccactggtctaggttatacagttattctctaactaccctctttcccattgttctagaggataggaggagaaagaaggcttgaaaacttacatgttagatattcatagaattctctctagaaggtgagggttttcttttgcttacctgcattttctaatttttctacaatgacactccctgttttaaaaaagttaaaatttaaaacaacatataagaattttcaaatgtcttcaagggcacatttagacataactggctagtgctaaaagtaggaagagaggtattaagaatgaaagagttttggttggaatggatgagtcttccagtgtttggggatgaatcaattaaaaggaggtgaaacaggaaggcaaaaggcagatctctgtaaaccctggagtgtttctcttgagctactcttcctcctacacaagagctcccatccatcctcatagttgacatttgggatgtctataatgaatatggatttgatgtgatttcgtctctctgccaaactaactcacagaactaattccacttttgactatgttaaatgaggttttaaaaagtgtattaagaggataacttttgaagtctctaagctagatcaagaggtgcatttgggagaaaactttggggacccttcttaccccttgctcacagttggagtcatattttgatgtctttgatttataagggtgagagactgtggggatctgtcttgagagggctttgacttttaagggattcaactagttgaaaccttatgtgcatttggaaataaagctcttttatatcacagggtctaaaaacttgaaggtggaatgggacctcagaggtcaatactctaacctaatttggatgcccatgtcccctcctttttgtctctgcccaagtgttcagctctgcctgatacctgccgtggcagcccaattcctttcaggtgtagtccatggaaggtcctgctcacgttgaccctaaaccccacttcctgtaatgtacagccattattccaagatctgggagatgggggcaagcacaaacatggatataagctagtgagatctgtgtaaggaatagagaccatttttgttgaaacataattcaacatgactagcatctcctgagccattctttctatgcaaggcacagatctaggtgctgtgggagacataaataaaatagagtccccaccctcaaggaattcacaagatatcatttaatgtgtgtaaacaacaaactccaatacaaaggcagaagatgatctgatgagggaaatggaaccaatatttgtcaagttcctttgatgtgccaggccctgctttcattgacataggtctcaagtaatccttgtggcactgtgcattaaactccctgaacctcccttccttctttgtaaaatttaatgttggactagataccttctgaagtcccttccagccctcatatcccatgattcatccctctttctccagtcagtggccctaggcttccctctcctggattgggctggctagggaaacggaagggcaacagacttttttgttattattcgctttctcccctccctgtgagatgtattgttgacttaaaaccagtttgaacaaagcactcaggaataaaccacagagaaccatctagaattggcagaggataaccctatgaccccagaagccttttccagctctaatttttatgattcactaatttgccacaccacattcaactctgtccgggaactcagagttcaaaaaagatgcaatgtaaattgctggaggtaatgagaaggctgaaggcatggtagggccagaagcttggttttctgtgaaattaaatacaggaagatatttaaagaagccagaaagcttccccctcccctttttcttttccctgagagattcccattttaagactggtagggcaaatttcaggtttcctcttttcagtggtatgactaggtttttgctatgttatgactccaaaagagctgcctgtttgttttataacctcccaaaaagctgttggatgtggatgtggctgtttagcaataagttctgccgcaattttaaaaatcacttttgaagtggtgggagaacactgtaggaagaccactgttctctaaatatgcaggtcattttttttttttttgaggaaattgctgagggccagaaagttattgagataacttggtatttgatggatctcatgaatttttagtgctttctacatttcccaaacttttggggatcattaggccccttggtggcacctttgcaacttgcattaaatttatggactgaagataagatacaagcaggataattgttccagagctccatggctgctgaaagaccagtaggccagtagcctttggtgcttgtgggagcttggtaagagttagctcagtgtgggaatgaggggtttgggtaagctcagggcatacctgtgcagaaggataatgaccaggcactacagtggagccgcattgtgcctgggtccaccttctgcagtcagctatgcagtgcacaccacgcatgctaaaattattggcaaaaataccatagaaggcaccatgtaaagtatcagatgaaaaagttgtcttgtgtttagaaaccatgctatatgagaaatatatctttgaatgttggacttgcactcagcagaagcacctgaggcctgaagtcacagatgaaacagtagattatattattcatcttatatgtcctctggggtaaatgcctatagagacaaacactgggcttaattaccagcactgcttatttattttgctaattctatttttctctaattttctctccaatgcccccaacaaatatggaaagttcaatttgcaaggtaaatgagtacatgatataaaccgactgtatcaagatttacatggtttatctcctttgcttttcacaaaaaccctaaaaagtaggtggcattgtccccacttgcagacgggaaaactgagagaggtcacaggactagcctaagttttctcagtgaataggcagtagtggaatttgaagtgaggctccaaagctggtgctcctttttctatgccttacatactagatttttttttaaagggggatgagaaaatagaaggcatatgaaggaggacagagatgaagaaaggcatgcagggaagaaacaaacatttcttcatctcagatgccctctggggtaaatgcctacagagaagaacattgggcttgattaccagcgctgtttgtttatttgtatctgctaataccattattgtgcttggcattttcacatctctatgttccagactgtattagtttcctatggctgccataacgaattacacaaacagtggcttgaacagtagaaatgtattcctcatagttttggaggccagaagtctgacatcagcatccctctgctgaaatccaggtgtcagcataaccacacgctctccggaggctcccggggagaatctgttccttgtctcttccagctccgggtggctgctgtcattctttggctttgaccacatcattcccgtctctgcctctgcgatcacatcgccttcttctcttctgtgtgtgtcaaatctcttctgcctctgtcttacaggacatgtgtgattatacttagggacgtgtgattacacgcagggcccacccaggtaatgcaggataatctccccatctcaagaatccttaagatttgcagttattttttgccatttaaggtaacatccacaggttcttggaagtagggcatggatatctttccggggaccacaaatcgacctaccataaagactaatcataaatgttacagagcagcctaggttgacagctcagccatttacatattttgttcttgttgtttatttttctgactccagaacccacagcttaagtctcttcacaccagtgtcggtgtaataatgtgtaatgtgtttttgccatgttgttaactcctcactgacatgtaagccttaatgttcactgttctcataagattaactttcagttcagatggttagcctgtggttgcccttggtcagcgcttactcagaaggccacagcccatctggtgcccacaacttctgaaagcactggggctcacattgtcatgagagaaatttagatgagctatgtagaagatctgattataaaggcaagtgatgggttcactgcattcttttcaacctggcaagggacagggttggaggagatttgagaggccttcagagactgcagctgcaaaacaggaaatgactttttagcatgttctttgacctctgagtggaagactacaatttggaggaggcaagaaggtgtgcaaacagggaagggctgatggccttcacaaaccaaatgtgttactaggatgttggcgccatgctgaggtgggcgctgccgttcacaagcacttgcagccactctggggtgtagaaagtgctcctttacacaagtgttggttctgatcccaagatacacaaacccagaggggttttgggtcttctgaaatgccagtgatgtctaccaagggcttgaggttctcttttgacttgaaaattagatagttgggtgtcaatccatcattttaaattcaggtttttcccattcccctgctcaaaccaactcactctgctgatgtgcccactttggacatttgtacagggattctttcagttactcagcactgaagccttgatgtcaatattgaccttttctttccttggcttcccaccttcttcaattctttcagaggtgaagcagatagtctagtgataggactgtaggatctggagtagagagagaaacaaaaaataaaagttgggttggaaccaggctctgctacttatttgctgtgtgaccttggacctgttttaaccctcttaaaaactagggtaagagacaacttaccacatagacttattatgatgattatataataataataatatgagctaataataatagttattattgttcttctttctttcattgtgatattgtgaaatatatatttagtcttctaccgtttcctggcataaaactcctaaaatccttagcatctctaaagcgataaatctttgtatgctaatgattgaccaatagctggcaacccctagttagcttgaggatgggggctggtcaccagaaagacaaaggcatgattagagggttgggacccttggtctttctggtgaccagcccaacccccacacctccggggagaggggttgaaggtgaagttgatcaccagtggccaatggtttgatcaatcatgcctgtacaatgaagcctttataaaaacccaaaaggacaaggtttggggagcttctgggatattggaacatgtggaagtccctgaatggtggcatgctcagggagggcatggaagctccatgtccctcataccttgcagtacacatttcttcatctgtatcctttgtaatatcctttataataaaccagtaaatgtaagtgtttcactgagttctgtgagccactctagcaaactaatcaagccaaaactgggagtcacgggaactccaacttgaagtcagtcgatcagaagttccagaggcctgaatttgcaacaggcatctgaaaggtggacagtcttatgggactgagtcctcaacgtatgggatctgatgctatctccagatagatagtgtcagaactgaattaaattagaggacacccagccactgtccactgcaaaattgatggcttgcttggtatgtgaagaaaaatcctcatgcatttggtcacagaagtcttctgtgttgatcattgtggagtgagagcagtggaaaaatggtgtgagtattttctcatacttccaatctagttcaggctttggtgaccaaaattaacactgtaataatagattcttttgaagtagtagttttcaaaccttttaaccatgatccacagtgacaaatttacttcattactaaattatgacattagaaacgcatccacaacattaaagattttatgaaatatcttgatgttttctattcttttctcacttactgcaaaaaaatagtgttttttgtgttttttttttttcagatggagtcttgctctgttgcccaggctggagtgcagtggcatgatctcagctcactgcaacctccacctcctgggttcaagcgattcccctgcctcagcctcccaagtagctgggactacaggcacatgccaccatgcctggctaattttttttgtattttagtagagacagggtttcgccatgttggccaggatggtcttgatcccctgaactcgtgatccgcctgcctcggcctcccaaagtgctgggattataggcgtgagccactgcacccggccaaaaataattggttttaaatcaaattgattttatgacccactaagaggtaaagtcccacagtttcaaaaaataatgctctagagatagtcctgactgcagtctctacttccttctaattcatcaagtatctacttttcaaaaggagaacactttccatattttgtgagaaagcattaccgtctaccatccacatttacatcatattttacaattccaagtgcctttgtatatagcatgtcatttaattctcaacagcctttgagaaagaagttattttagcttcattttaccaatgaggaaattcagattcaggccagtcacatgtctcatccaagatcatgtacctggaaatgactgaatcaggattgaatccagctcttctcaaatggatccagggctcttctacacaaagcaatgaattgaaagggggatttatgtttttagaaccaaataggaatacaaaatggattaaagtcatgggcaaatcttctattttatactttctttcataaaacaaaacatgtaggattactaccacacagctttctctaagagagtcacattctggagccaacattagcttaatggttgtgccacttaactgcatccccactcattcattcatccatccactcaacaatgtcattcattcattaattcaagaaatagtttttgggtctctaccatgtaccaggcacttagtatatggatactaagatgaacataagaaaatttaaaatgtccccaatcagcacatggtactaaatgctatgtggtactagatgtgtcaacacatataaggtggtactaactgctattattagcatgtaaggtggtactaagtgctatgtggtactaagtgcatcaggatgtaaggtggtaccaaagtgccattattagtatgcaagtgctattattagagtttcagatggtactatgtgctatgaagaaaataaaacacggtaaaaggaaaagattgttagggttttcttgtgaatagtatggttaagaagggttctcagatgaggtgacatttggacagagacctaaatgaagtgaaagggcaagccatgtggatatctggggagaattttctggaaacaggataaggcaagttaaagagagtgtgagcttggcagtgattgaggaggagcaggggaagagtgtcaggagatgaggtcacagaaggggttagatcatatagaacatttaagccattgtaaggacttcggattttttaaaattaattcttcagaaaagaactctatggaataattcaaaaaacatgttttgttagatcatttttctttcacacaaacttctttaagccctagtagtttagtaagttgccctagctgagagcccccatcattatcattgtgataagaatctcaagttatggcttaagaagaaaacccacccactcaacccatcctccatcctcactcattccctctgagcatagctgtatcctcaggcttcagctgaccttattctagatgatactttaactttgatctttgatctatctgttcttttttttttttttttttttgagatggagtcttgctgtgtcgctcaggctggagtgcagtggcaccatctggctcactgcaacctccatctcccaggttcaagcgattctcctgcctcagcctccccagtagctgggattaaaggtgcccaacacctcacctggctaatttttgtatttttagtagagaaggggtttcaccatgttggtcaggctggtctggaactcctgacctcaagtgatgcacccacctcagcctcccaaagtgctgggattactggtgtgagccaccatgcccagcctatccattcttaacaaaaaattaccattggtgatgaaccatcaaattttaaaatgcatcatagggaacatatcacacatgtaggttcagtcccatgctattaggatggtgcaaaagtaattgtggttttcgacattacttttaatggcaaaaaccgcaattacttttgcaccaaccaactatgatgtttgaccaggcgtttggccggggatgcactctgagcactaatagcttggtgtctatggattacctgggtttataaggaggccttaggcatttccttagtgtagctcattcagcagagctaattttcccattttacatgctgtgacttcagaagcctggcaacctgcatcattcttgtcttcctatttgaagaatacttcctcctgtagacacctccagagttcaggtaatctgtgttcctccctaataataaaaatagcctacatagagtgagtctttagtggggaaaagttctgcactattagggcagagcttaacatgctttattccttttagtcctccaagtaacccactgaggtaggttctaatattcacttccttttatagagtaggaaatcaaggcctagaaaggctagataactttcctagaatgagaggtagagtctggatttaaatttgaaacattctccgttagcttgattagctactgggccacgggtgctgtgtatatcttagctgggtttgtaagaaagggaagtatgttttacaagaaggcccattttctcctcagcgccactgcctttgccttccctttctactttctttcccttttctggatggcaccttttatgttctggctcattttgtctctgtttccctccctccctttttctttttttctctcttcttctgccaacaaaataaaacccaatctcaggagggaatctgatgagtgcacacatatgagtgatcataaggtcacaactcgtgagcaggctagtctatggcaggaacatatctgatcaccgactatttagaagtaccctctacaggcagtctttggggctgtgtcactggattgattcagtaaattgccattgctctgacctttggggaagcctggcacattagggaccagagagctgaagtgactgcctgagatcacacagctagctacgacagaaccagtaggaggactgaggcccctgattctcagtctcatgttctgtgctctagattatactgcctcttcgatttgctttttgacatacaacaaaaactttaagccaaatgagtcactcttgatggtaaacctcgaagtggccttgagtcagaggtggagagtttttgggatgtaagaggctcttttaaattcccagcatatagaaagtggcctgctccagttatttttaaggattatcctggaaaacacagtaacagggagtaatcatctcctattatcagtgtagacacacaggacaggcaagctttgatgagtagagaaaattagaggtaatcatctggaaagagcagcatatttccttaccagcaaaggcactgtgttgagaagtcgtgggtcttttagacagacaagagcccagagaacctactggaagaggaaggccctaaaacaagaggtggagtgaccaggacaatcctgcttcacaattgccctcatcacatcaacgtaaactgacccttcgctaatcggggcatgcagagaatcttccagtagccagttaatcttcaagtttgtaggtcagaacattgcagggctgagttagctgacccttggatctgcatactcttcctccaggcttacaggctcacagatcatttctgtcccctacccccaaggacccaagtgcttttaactctccaggccaaatccactttgctcctgggctgaagcacactgggcacattcttgaacagagttcaaactaacaggatttccctaaaacaagcaactccctggatgccctgggaagcactgtgactacttgtggggattaacttagccagagcaacgtggctgtggtccagaaagaaaatgtatgtgcttacaaaaaaaaagctggctcagagtcttgggaaccccataatcagaagcatactcattctgacagtttcaaaagacccaacacccacctcagtgtgacctggcgagggttcagagaaatccaccccgtcttttgtcttttggatggaatgcaagagccatgtaagacttcctgcccagaaggcagagagtgggcaggcctttgccactcgcctcagcaatgtagggagacatggaggccatcctttggctcatctttgggtgctgtgacttcatcttatggcatgaggcattctgtgttaattctacatggcgcccaagtcattgcaaatctgctacctaatcttcagggtttctattggttcatgttttgttttgttttttttcctggggaagagctactcataggttggggtgtgggtggctcctgtcaagactggaccttgaaacaacagcactggctggtagaaaagtcagtctgggtctaagtaggagctgagtcacctctggcttcttggttatttctagtaggctagggagaggtctggggctcaggggagcctactgtctatctttaatgagccagattctaaggtttgaggtctgggaagagggaaagtcttacagccactaacagacactctcctgtggtctctaactgacactgcataggactttgcctgtgggtgttgggtttgcaggccgctcccgcaaaggaaaatgaagaagctgtctgctgcaatttgttatgatccacattttctgcaactggaaatgccagtggaggattttaaaatattggatccatactgagccaacttcgtggggggactctggcaaatggatggcttaaacatttccttagaaatcttaattttctaatactggctgaatcttgggacaaaactactcttgcaggtccaggtatagcagccagccttcctctgtacacacgggtgctggtctgtgcctggggatgaggcttcagtattattccttgaaagtcttatttttggcgtatgactccaatgatgatcacggatgagcatggtactgcacttaaagcaagatttcaaaccagtgctttgtagacaacccttagttaacacatcattgattgcttcttcctccaaattcaccatccttgcatctatacattcattcattcaatgaacactgaatgccttctacttgccagaacctaccaagtgctgaggaaagatacaaaactgattaagaaggaagaggtggaagcatgatctgaagaacccttgaagagtagcagggtcagtgtcttgcttggagtaggaaaagggaagataaagagatcttctgaacatgtaggccaagacaacccttgaagatttagtagattggactaatatgtggtcagatcacacatggcaatgatatgaatgaccagaatgtccaaatctggaagagactgggatctgaacttgaagagggagaatatggtctcctttgtgggagtgcatgttgttgccttcttatatgagggaccctagtgatgaggattgctgtgaggatgactttgaagggatgtgcttttgtttgtgaatacctctattgaagctgctggaaagattctggtctgtgaggaattatctggctgttttgattggaatggataattctacgtcagtactacaggttctaatggcaagggctgatcctagaaaggacatgcacatgatcacacttgtccactagactagaagttccttgatgtcaatagtattttgtccatttcatatccccaggcttagcagatgcttaatatatgctggtgaatatatgaaagaagtgaaatttgggtaagacagtgtggaaaggatgagtagaaacccattactatgacatgagaaacccctctagtatctacctacttttactgagttagggggaaaacctgagtcaattttccttgtcttctacccccaccctccacacaaagactgggtgcagaattaccattcaattttcctcttcagcaacactttgtgtattgttgtctacaagcaatggaaaaaaatgatgctagcctagggaacttaaaaatcttggaagggcatcagttttggcaaattctaattcctagagttgaaagcatatgtatcagccagtgtctctccagaaaaaacaaaacccatgcagaataatttaatagaggaaatttaatatgggaaattagttacaaaggtttttagaagagttgaaagagcaaccagggtaaggcaaggcaaccccaagattagcaattgctgaaaactcctattttccctagggctggaggaacaaaggtattacctgagccaagagcctgagctacctgctgaaagctggttctggggggaatccaactggtagtgtcttgatagagaagtctcagcccctagtaggggaggggtgtgaaaacctggcttctcttttctgcccattctcaaatatctgcccatatttgtcatttgccaaaccaagcaggaagcagtggggaaccttggtagtttatagaggtcatccttctttgaatatagagaagagccgggaaatggcagagtctggatcttagagcttgtttgcagatgtccagcacagcatccactcatccatccccaacactcctgctgactctcctgtacggtgtgaagttgagggaacatgggtgcactctgcttggataaatggtggccccttgggaaggttatactgaactattctcctctttcttccatatttggccttggaaaatattcagatttcttactgaagccactaaatccccaaactagcctcacacttaagactgaaacttacatgaatggaacaccttttaggcagctcctcattaaataaacacttgaccagtaaggggacaggctgggtgaactttgtttgtccagtctttgcttcttcatttgccctcaccagtgggatggaggtgagcaggagggataagagaggactggacatgtgctgttgggttagaattcagattcatgggtctgctaagtcctagttcacaggaaatgaggccaagcagatctataggagagaaatgggggaaactgagaggctcactgaaaccacggatgccattttacatgccttgtaggcttccacggggtagactcctggttggggacccattctgtttggagatcctgtgatcacataagtagtcaaatgccctgtgtcagttagaatttgatcaagaaagctgaaccactatgagggacaaggtgaatgagggcttttctgtagggattatgttttacacagttttggaagctggtgaggaagtcgatagaaggctgttgcctcgtctggtgatgggcctgcggccattgcaagtccataggatcatcagttggaaagaaaaggttggatatgaagtgggaatggccaaggataaactggaatgcgccagcatgaagccttgaagacaaactggaattcacatgtgtcactcgttgctttagtccattcaagctgctctaacaaaacatcttatgttgggtaatttataaacaacagaaatgtatttctttcagttctggaggctgggacactccagatcaagacaccagtaggtttggtgtctggtgagggcttgtgttctgcttcatgggtagtgccttctagttgtgtcctcatgtgctccctttaatctttttaataagggcactaattatatttgtgaggacataagcacttccccacaggcctctcctcttcccaccatcacatcgaagattaactttcaacctatgaatttgtcaggagacaccaacattcagaccatagcactcaccaccttgacaaagcagttggtttgcagaagcaggtgtccttctccatagaactgggcacatgcctggttcaggacccagaggagctgaaggaagaaatcttgtaggatctgaaagagccacaggaccagctctgctgtcttccagcagatgggcagtgtacctgtagcagcaatttaagctaaaaagatgcctggagccccatacctccttcccagcataatggaggctaattcactttcacctcccagatcccactctaaagtctcttgtagccaaccctaacttagaactgtacaaggaagagaattctgagaattctagttacagtttagctaagtcaacccaggacaaagccagcatatgtggcaagagagctcggaaaactaatggttggaggagagatgcctgtttggatacagaaatgagctttcatcacccctgagagagggaggtatgtctttcacttcttggtggttggcagcagtaaagctggtgacctcctctctggatggctcctgcactcaggggaagccaggagatctacagcccttggagacctgcgagggccctagctgaccagaggctgccaagaatttgcatctccaggatgtatctctctcaggcttagggaaaagagaacctctttgggccaccccagcctctctctctcccacacagatataatcccacctccctgacaaggccgttgtgagaattcattcgttaatgctggggaaagggctttgaaggtgaagagtgcattgtgaatgctgttataattgtacacagatgcctgaatccagactggtggcattttgctgactaatagtagaatttgttggagttggtggtgaccttttcctcccgttacatttctaaatattttgcttgtcaactataaacaagcccattccaaaacaaaaatcagttcttctactgatgctcataaaattgtacttgttctgtggaggatttccggtttccctttctccctcctttctcttctcttaggccaaatgaggtttacttagctgtctgctttcccctagaggagagcctgctgagaattgaacacaccatttcttgtttaccttcacattcatttctgaccaggtggacaggatgtcaaagcttttagccaacttttcagggtggcaaacatattacagacatgcattgttataaattaccatcagcggtggaccacatatacaattgtggttccctaagattataatagagctgctctatacaggtgtactatttttttctctattatactgtatttttactgtgccttttctatgcttagatttgtttagatgcacaagtgcttaccattgtgttgtaattgcctacagtattcagtaccataacatgctgcccaggtctgtagcctgggaacataggtcataccatatagcttaggtatatagtaggcttgcccatgtaggttgtgtaagtatattctacgatgttcacacgatgacaaaattgcctaaggacacatttctcagaacttatcctgttaagcaatgcatgactgtggtcaaacatttagattctcattttttttttttaaataactagagaattggcctttcctactgcacttctggcatcatgtcggcagtgctgctgtttgtatctctgtccttttttttgagatggagtctcactctgttgcccaggctggagtgcagtggcaccatcttggctcactgcaatctccacctcctgagttcaagtgattctcctgcctcagtctaccaagtagctgattacaagcatgcaccaccacacttggctaatttttctattttttagtagagacggggtttcaccatgttggccaggctggtctcaagctcctggcctcaagtgacccccctgcctcagcctctcaaagtgctgggattacaggtgtaagccactgcacctggctttgtatctctgtctttctgaaccttcatccatttctttcttgtcccatttgcttctgtattataattttgaagtgtgtaataaggacaacaggttgtaatacatacttatagcctgtctccccacctcccctttgaagcaaggcctttaatttttcaatatctcttacattggttaagataagatgaaaagaagaaaagaggaagaaaaatatctcaaattactagagaggcccagtcgacacacgtaataaagagctgagccaaagaggggagcagggagagaaaaatgaaagcaggcatgaagtgggctttcaggagagtgtgagagccatagagagggaaggagtaaatagatttttagggggagccactgataagtgtaagagaataaccatgaaagatatctaaagagggttggattagtctgctgggattgtcataacaaaatgctgcagagcaggtagcttaaacagcagaaacttactttctcacacttccggaggctggaagtccaagatcaagatgttgggaggattggtttctcctgaagcctctctccttggcttgcagatggctatctcccaacatggcctttactctttgtacatggtaacttgatgtcacgtcttacaaggactacagtcatattggattaggactgcctctctaatgactctaatgacctcatttaaccttgattacctctttaaaggtcctatttctaaatacagtcacattggggattagggcttcaacaaatggattttaggaggacgcaattcagtccataacaagagttttaaaactattttattatatgaaatatatgtcctcccctgatttggtgttttctaaaaagaacaagaaaggatttaaatagctttcaattacatttatctatcttttctgttgaattgcttttaacatagcacttcaccaagcctgggccacagggcctctgggtttatatgtgttacattcagattcaggcaactctctgttacccaatttcaactaattagaatgtaataaagtagacttgataagaaaatcagaaggaacctaatttaatctctcatttgtaattcaaaaagcctcttaggagtttacttatccccaaatatgaaaattatatgtatgaaaaaaatccagctacagttttgttgttgaaaaaaacaaatgtcatgtaacacttattttttgtaggtataatcaagtatttataaccacatgtagctctatatagttataatgcagattttcttttgctattaagaaaaaaagaattgtagcctcaactctgctagtttcgtttttgatgatcatctaaatgaaacctgtcatttagtgactgtaatttggaagtatcaataactgtttgaaaataagcaaaccacaatctggatgggagaataaagcttgtcctccaagaccatggtctgcttctctgattactgcttggagctgctgcagattcacataatggctccttaaccagtgctcggggcagtagctatgaaatctggagcacattttgccgaggctgcagacacatgttgtatgtcaaacatacagtgcctgtcaagatacagttctaaagtattggtggccccacacccttcacgagatgtgtcaagagcatagagaagtgcatgtggcaccttccattgtgggtgcaaacagatctgcagcccctggacacatctgagctactgcatcacgttgatgtggttatttgcagggtctaacctcagatcgtcttgctgaggaatggcacacagagcaaatatgttagagtggaagagagaaagaaagagagtgtgggagaaagttctgtgagggacataaatggaagaagatatgaatgtcttgtttattcagggacaatttctaggccaatcaaatcaatgctataataaggctaatctggtgcctactcatgcaataagacaatagtgagatgtgggtccagttttacaaatgccatagtagtgggtccatatttccctgggatgggccttttttaaagccattattatttataattcattcacatatggaagacgatggttccttatggttcaaatgatccaaatctgggcctttaaagccatgcatgatttatttgcacaaggaaatcatgttttctttggagcttttcaatggaggcataattacagtgttgcaaatacagtgctctatttaagggtctgtcagcatttccataataaacctctattttcaggagtccagaacatttccagagagagagagaaagaaatccttctaaaatataagcttggtgggtccatccggggactttatttttaatccaaatctgtaaatgcatttgcaaccagacagtcttctgtatttgtgtggtggtgccagtcatgtaccaagcgtcgctggaccctgcccagtggggcttcagctttaaagcaggatcttcctgggaagcagcagcgtgctgggtggctggccagctccctttccagaccccagctgattgccaacttgcatctcagcttgaagaaaagaaaaaaatgtttttgctcttgctttttctctcttctttttctgtttaacttaggcatatgctaacttggatcttgaataataataatatgaataagaacattaagcctgatttgagggcccagtatgtgcctggcgttttacaaatacttaatttttaaaccttataacaatcctgcaaagtagaaatggttattcttgatttttagatgatgaaaacagaccgaggggaggtaacttggctggctaagaacaggagagcaagattcgggcaactaaggcagtaactgagatatccccatgatgggctccacaatcttttgggaggcatctctcaagttggagcagctcttttagagggaatgagactaggaaaggtggatggactcagagaagacataggcaggacacagaaggctggtgggaaccggccaatcagtagaaaatgccttggaagacatttaacaacctcccagagtatggtttcataggtaagtgtgatttgagttgaacctggataaaaatatgtgaagtttttggaggcttgctatgtggcaagcttacactttacatggattatctcatttatttccccattttaccaaaacagagaatgagtttttatagagattggataaaatgcccaggattatataatgaggaagtggcagagttcccaggtctggaatcttggttcttgaccattatgctttatggcttccagggggccagtctccctccttttggaaggtacagtgtgaatggagacaggaagttgaaactcaggatcctcctgctttacgtgggagatcctttctccgaattgctgatggatcgtttccaggagtttgtgtgttggcatttagcagaaggaaaaaggtaatatatacccctctggcacagggaggacaagggacaggcaatggagggtaagagaccaccctctgcactgcgtttgcagccaaccacggggaaagtgttttgtaaactcctgatccctcgtgggtggtgtgatttaattctttttccttctcttttctgggactgcttttgggttgctagttccagctgagactagaagtggcaacacacagcccagggagcggcagtagaggaaagaagggttttcactaagaaacttttcttccttcttcttgaagcaaaatcaggtaacgctatgggggatattgcttactgaggtattttcctgctgttgaagctggggtcagggcttaatgtttagagggagaaactcaaattgtctttttagaaagcaggatgcacttatcttatggaaaacgattcttgggggtggcaaaatctgttctgccgggatttactgaggtccttctaaggggtctgtgttgggcattattctccataagggaaagtgtcttgactggcatggaaaagctgattcaagtcagtgttggagagaaatggtagagggaggtccctccatggtgccaaaacttccacgctaatttgagagattgccacactagtcctactgagaataggaagtgaactgactagtgtctatttagaataagtgctattcatttattcagtcattcattcattcaaccagtatttactgagcatctactatatgctggacactgagataggagctagggattcaatggtgagccagacagatgtggtttctaccctcacagaacttaaaatctagttgatagagacattaagcagataatcacactaatacttaaataattatgactgtgataagttctttagaggaaaatacaaggtcctgtgagaacagataaaggaagaattaagtcctttacaatgcattcagctgcaaataacagaaaacccaatcaacagtggcttgcctaagtagggtttgtttctttcacataacaagaagtccaaaagcagacatttgctggcattggttcagcgatatcaagcctccaggccatttcttgcctcttccctgccatcctcaacataatgattttccacccatacgcttgttgcctcatggttacagaatagctgcagcagctccactttcaaagactggaagcacagggaaggaggtatactagagaactcttttctctaacataattgtatttcatcagcagcaacatttttttcccagaaacctttcagcagactttctgctacattttattagccagaactgagtttgttttttttaatgaagactacagaaaagacaaactagtcagtgattatatgtgtataatgataagtaatatttgtggaatgccttataagccacacttgtgtgtattaagtcgactgattcttacatcaatcctgggagagagacagagcaatttttcagatgaaagcattggagctcagttgagggacttgaccagaaacacgtagtcagtccccctccagctagaggtcctcatctcacccttgggtgcttgtatcaccaggtctctgctgtgtttgggagagtgggatgatcctgagccctaaatgcagtagattcctaaggggacatgatggtttgctcgctgaggtatttgcttagagtctcgaaatgttgatagtgtctctctgatgttttcctgtggctatccctgggattcaaagtcacatggtaggaaggagaccagctgggaagaaagaagctttcttctcatggtgaagtcagagtctcacagtggagcctttgggatccttacttgccaggatataaaaacaggtatagaaaatcgtgtctgctgatggaaccatgacctcatttccagaggactttggaaatgttgattttaagtgtttttgagtaaccctccccaacccctggcaccccacctgggcaaaaagcagtgcgtttaacatctaggatacatgaatgaacatttaaaccacagattctcatgttattctgaaggcacccaaaagaggcaggctgccaatcatatgtgacatcctagtctgctccccccagctcccagcatgcagtgtgtgcccgtcacagcagggtcatgtccttgggtcctcaggttgtttcactcttctcacctcccttgctgcctcttgtatctgggctctgaggttgttggttgtctgttgctgggctggttgaaagtagagacagacctgttggcttgagaccatcctatgaaaatcaggactggcagggagcccagagacgcaccagcacggggctctgcatccctgagttacgccagtggaaacaagagtcatgtaccctgtgctggagaacgtgtaaagttgacaccgtttaccagatgttccagtgttttatgagctttacgaggccttctgttaagtaacacttactttaaaaaaagtaaagcttgcctgctctgagtggaaagtttttgtcttttgtttttttaaaaaatcttttgggtgaactctgaggcacctgtttgcacagcagagctctggcctgtgaggggctgcttgtggtgagtgacaggcagggagaggtatgtggcaggcaacctggtacagattttaaaaggccagagaccagaggcccaggctcctggatgcacaaatacacatgcaaacagggacccagatgtgccccctttcactttaatacaataaatatgttcctgaaatgttgagtacaaatcacgtgtttttgtagccccaaatattaataggctatttctttcttatgctaggaattgttgtagaaacaaaaaattaccatctaattcatttttagtgtactttggaattttcaaaagatagatttgattaacataacatccattttcatcacatgctctagagtgcagcatattacaaagtgggcatttatcatatttggtgtcttgaagatgtcattcaagatggtgaacaactggcatgcacggacaggcatgaaaagttcaatgcagaacgcggcaaacctactcaggtgaaggtcaggaagatcaagatctaaataatttgatgagagaaagtcaggaaggaaacagttgctctgtgggagcagtgaagagttctgttcagtagtgttgaggagaggccatcaagaaggctgaaaacaacctggtttggtaccatcctgtccaaatcactgccacacacagacaatggggcaatggggtgtgttaaaatcaacacagacccctgtcaccttattatccaacttagtttggggagaaggaggaggaggaggaggaggagactctgtttgtcccacaagtatattttgagtgcaactcagttatggcccagcaaccaaccaacaatctttataattatagcagcacatcagtgtctatgggttagaggtcttctgactccttaattacatgtgtggatctccatccttgtctctaccagggtccattgtctaaaatcaatgccttcaatgggagcagggctttcactgggctctgctgcatgcagagagagtagaaaggagctaagtgtggaaggaagcacctcaggtaacactggttacctggagcaggagcattgaagaggggaaggtgggatatgagaaaaaaagatcatggaagagaaaaatgtgtgcactgtattaaaagacaatatgtgtgatatcccatttatatagaaaatgtatctatgctcacatatataaggagatagatgaaaggatggttatcaaaatgttggtgatgattagcaggttagtgggctttaggttagctttcattttaaaaaatactttctggagtttgaactttttacagtgtttattattttaaaatcagaaaacaataaagctactttcgatgtgaaaataaaaatagcaaaataacacaaagacaactccctgcatttcagagctcagggtgtctctcctcctctctccccatgaagcctggctacatactggaaatgtggcctccaggagaaataaaagaggatacaagacacggatcactgatgccacggctggggttgtgacgtctttttggaaaaccagttgttggttaccaggtggatatctcagagcatcagcaccaaccttgtggaaactaagcttgcagaggcccctgtgatcagaaggattgctcatatttttgctttccaacggataactaccgagaaggtacttattgtcaaataaagttaggcttgttaacttcctgcagcaagggagaacataccccagggacccatctcaggaggatggaatggggaggggcattttataagctttgaactcatgcttaatgatggtaaggagggactaggggaaatgtggacctgctctgaattgcatgccaacatgaagtggggacaggttgggtatctcagcaacttctgaggcagtaggaaagagacaaagctggagatgtcatgggcaaggcaatctctaaaaagaagaattgttagtcactttgcagcatggtgtggctttgggagaaacactgatttttgttggccttgcctcaggccctgtcaagtctttcagggatgtttctgatgaacagctgggttgattttcgttttccttccctggggcccagggctagctgtcattgctggagaagtggttagtggtggtgagggtgatggaggctgctgtgtccacagtcctggctgggaagggttagggtggaatgcatggagctttggctgctgcccaggacttcatccttcatggtgttgtcaggcattggaagcctgtgggagtgaggagaaaattgctcatcaggttccacagggcaggtcctgtacccactgacatagaggcttctggggacagatgcccatcaaaccaactgaagatgcctccaggcctcccaataggtgttcgagccccacccttgctgtgcagaggctgggaaactcctcaggaatcctgcctgacttcctctgattcacttcattttctccataccgctgttttctcttctatgaagaggggaaaatcataccaacttctctaagtaaagccaggatggcttcgggggcaacccagattatattctccaagaactcctaagttcaaagagaaagaggatgccgaaatgtgtaggtcttaatgtggggtgagctcttattctgtggtcagaaacacacagtggccccactgacgatggcgcctgccggcctgcctgacgtccttgtggagttacgatggtggctgccgcttacttttcttccctccctttgcttaccctgaatgacaacttcttcaggatgatacccctgaaccatggcttcctcctgtctcagacacgcctctttttcttcctgttcctatggcatccacccctaaatttgtcctggcctcattctcccaggagcaaggtggagggcaggaggcagacgggcccaggatggaaggtctccgagtcttggtcttctgactcaggccctgaggctactacctctgtggctgcccaaagtgacaggcgcggcctccgccttagtggctggcccggactcactttgtcggcggagggtcaggactggccctgtagtctgctcataggacctggctgtcacccacaggcaattcatcctgaccgcgtctgcaactgtgtatggaaaacaacagcagtcgctttaacagcaaaagcaacaaacacacaccaaacgggatcatccctgtgctcccaggtggtgggaggcagatacgggagggaggacacattttcctgcgatattgaataagatgagcaatggttattttgggccagtctccagcaagcatttggagagcgcctcagaactgcagatgaagccccggattgactttattgggtgatttcagcacggccaaatatttgtagtgtaaagaaatcataaaacgtgctggtggtccgggagctggatggggtacagtctgtgcatatttgagatgactgtgatttggtgacaggcctgtttgatcccctcacctagaaataagttaggatccgccacagaaataaattaaatgaagatggcctggaatccatttcctctgcccgtcccttttccccccttatctggagaaatcagcagtttttttggcctccaggtgcgatttgtactgaatgatcacagttgggctttctctccggcgctggaagcctgaactggcttccttgccacccgcctgctgcggaggacagggctccctcttagtgattatgttcgctgtttgtgtagtctgcggcatgtgcagtagaaggctgatcggtttgctttaattaagcttcaaaagagaacccaagcctccatcttatctcctgtttgctccttaattccctttccacggtccctgctgtaggtgggaaacggagcctgtggtcagatgcagggtgggaccctcacggtctgggtgagccttgccttgagaatgagtttctctgaacttcttccaagggaactcttttcgaatgttctctgatttccacagggagctaattgccaatgaccttttttaaaaaaaccctcttgggtgtttctcagtgcaggaagaagcagtggtggggagggggagctgcggccggcactagtgaccccaccgtctgagagcttctaacagggggcgagtttcagcaggctccgtggaaagccctcagtgaggcctggtgaaaataggccccccgtacttttgtagaattttccttctaaaactaacatgagggccgcagcagcagctttttgtcccaagtaatcaccggatggattttttttttttaaccagcttctgtgctcctcagaaggaacatttgtaaccatgcattctttatgtggtcttcgattaataaacaggaacccacctttctagaccgatggggaaacaattttttttctgtgtgctgctcctgtgtgtagggtccatgaatgggggctttgagaacttgtcctttcgtggccagatatcaaagtgctgctcacacatacagattgaccgcctcaaggtgcggcccgggccgccgcccgcgtggccgcccactgcgcttccacgctggccgcctggtcgggccgcagggccagacttgtgatgacccagttttcttccctgggatgaacgccgacccaccaggaagaagggggagaccaccagcagccattctccaccgagtcctaaaataaccatatttatattgacttgtatgggctcttttttgtggcattcctctcccattcatatccctctgggaagagaaagttcatttttaaagattttctggcctcatgttcttccctttcttttctttttttcccctcagctcctctctcctcctctctcctctcccctccccttttctctctcctgtctcgcctcctctctcccctcccttccctttctctctcctctcccctctcctccccttctcctctctctcccctcccctctcctccccttctcctctctatctcctcctctctcatctccccttctgtctcccctcctctcctctcccttcctttccccttctctctgccctcctctctcccctccccttccctcctctctcccctcccctcctttccccttgcctccccttctcccttcctctcctctcccctcctctcctatcccctcccctcctctcctctcctctcccctcctttcctctcttccttcccttgtcctcctttccctcccacatcacagactggggttcccccagagtcttcttccttgtgctgcctcaagcattgagctgtgacttcagggaaaggaagcaggcagcatcaggctggggagtagagatcacagtcaggtccctccagacagagcgacatgtgaagggctgggactctgtctaggattcctgaagcctgagattaggctggtgaagacgtgagcaacagccaggaagacaaaaggcagcaacgtagtaactggaagtgtgtatcctgagtattttggcagtactgggtcctctggagggctctcctgtctggcaaaggcatctcctgacctttggcttctatttgattatgctgggaaccagcttcagagtgcctataagcagcagcactggccatgaccattgactcagagaggggtgaagaggcaggagtgtccccattctgttccctcctccttcctcgccttctcccaccagtcctccaacccttgttctggttactctagaagaccctgtaaggaagatagagttatggtcacctgggctaaaatctggacaggttaaaagtaacactcgctctgccacagtcttccagagcttctcaagaagctctttgcagaggtgagcggtgaggagactctcaggtgtagtcagggcggggtttgtggcaagagaggggcttaggctgtctttgctgtgattcacactgttcatcgtccaaggtgaggcagctaagggggctctcaccgtgacatctgcagctggaatcgaatgaggtgggacctttgggtctcctctacctgcatatgttggcagacagggatagtgcgggtttgatcttcatagggaagagatgctgggtggcaggaatgggacgttttaggaaatggtagagggactagtactcagctctctcacactcctgcccccagagtgcccagaggcccctgggagacacgctgtgggtgggatggggagcccttgttctcatgctgcagatgaacacactgaggctcccagttgcagcatgacttgcaccttcagagtgtcggtgtaccccaagctgtgctttcccagctgctcccccaaccccaggtacgcatgcctttgcagaggaagaaacgtgggtgggcctgcagtgctggttgtgattcttagcagccctgatggttgtccaggggatatcacctgcccaaatctcacataattcttacccctctttgtagggacaatgccaacgggaaatgggaggaaatgatgggagtatacactgtggccgcagcagggcaatggctgtagactgaaacatcctttgcacagggtgtgccctgtttcttaaagcttccatgctgatggtgccctgtgggaataccccaccctgcccttggcttggctgagacagtctcccttctcctcccctcatgctctcaggcatcgccaacactctcaggaagcaagaagactcccctctcctttccctgatttgaaggaaacaaaattggtccatgggcacgtgtccaggccatagggcagtttggagacttcttgataagggccctgtcacatggaccaccaagctgaacccccagggagccaggaggtaagagtcaattactgaggggcttggaagaagtgagagcaggtccaagaaagcaggcagcaggaggggaagggctgtaattaagtagccacaggccaaggtgctgagtctgttgtttttagactttgaaatacttttgttgtgctaatgcaggtgctgctgggggtgaacaactgagtggccttattgtgagaggagtagctttgggtgtctctttgttagtccatggctgaaacaccccagaataaagtctcagagtaaagcaagtcctccacttgtcaaagtgactgttgaaggttctggaagatgaggccaattctgcttttctggcttgaaggagggcagaggtgctggtctctgtgaaggggtggcctatccaggatcctatgctgggcactgtccataattctagagtggagccagccttggaggagctggcatctcctgcagcattggtcaaggggatgtttgccttgcctctcaaaatatttcttagaaaaggggagtttcaaataaatttggaaaactctacattctgcctctctctcggatgtttatgatgctctttatcatgttaaggtcctcagaattcctaagggaaagaaaccatttaactgtgttcagctcagaatgttctagcatgtttatcatgggaccgaatttacatagacgctaggaaacagcctctaggaaacccccttttaaaagtgaaatacttctctggtttggtttttgtttctgcaggggtgagtaaaacatttagggaggggactgtatcactgtatgagacacagtccctactctcctcttgttgaagaggcaacacacagctccccatacccccagataaccaaccagccttgagagggaggtatggggagagatttgttaaaggatccaaaattacagctagataagagaaataagttctagtgttctgtaccactgtagttaacggtcatatagtttcaaatagctaggaggaagatattgaatactcccaacacacagaaatggtaaaagtttgggaagatagatatgttcattaccctgatctggtcaatatacattatacgtatcaaaacatcatcatgtatcccatgaatatatataattattatgtatcaattaaaaatagaattaaatttaaaaaagaagagagtaggttgctgggggtaaggagctagggcaggctgagggtgggagtggagaccagtaggagaagagggaaaaagagtgaatgttggggttgaggagaagcaggtgaggaagagtaaggaaggaatgagagacaaagagggcccagggtgcttgcttcggcagcacatatactaaaattggaaggatacagagaagattaccatggcccctatggtagggggaggcggggtggggggaaagtgaggatggttaatgggtaccaaaagaaaaaattgaaagaatgaacgagacctagtatttgatagtataacagggtgactatagtcaataataatttgattggattacacatagcacaaaggataaatgcttgaggggagggataccccattttccatgatatggttattatgcatcacattcctctatcgaagtattttatgtaacccataaatatatatacctactatgtgcacacaaaaatgaaaattacaaaaaaaaaaaaaaaaaaaaaagagcccaggtgcaggaggaaggctgcctggttctgtcctgtccccaggctcaggttcactttagccctccctcactgggttcttccggtctgtggggagcagagaagtgggaccccgactgagaattcttggatgagggtggtgtggggatggcagtagctgtttagtccctgtgcggggccagagagccagcgtcagtgctccctcctcctctggggacactctgtcccttgcagtgatgccagggaggtgtagggtcagtggaagggggttcctctaatctgttcagggtcctttagctgagggtagagggcagagggcagagggaatgcgactctgggccccattttgtaactggctgaagtctgactgctcgccgctcagaggtagaaaacagaagaagagaggtgtggagaaaggaaagcaactttatgaaaatgctggtggttggggtatggccaagctcatgcctttggaagatcattccaactttttaggccgagggaagggttttaggaaggaaaaggtgtgggaataggcaggagtagtgaaaaggggcgcaggtccgcctgtctgctctgtggccatctcggtaatggcttgtggggaggtctgattcgcatcatactgacttcagcccggcagtggggggctcactgttgctaactcttcttgagtgggaggatcctgcagctgggtctctctgcctggtatgtttcaaagttggtccctggaatttctaagcaagctcataattagacaagcgtgcacagtgggaaaggaagaagcaaagagtttcaaagtctgcctcaaggctgaaagtaagaaaggaaaaaaaaatgtttaaatgcatcttgaggctgagatactgggttacaaagaattcatcacctggggcctatcttatgctcacaatctccatggcctcaggacgggcatggggcctgagagtgctgcttgtgagggccagtgtgtatccctgatctgggatgtgtttctgtgtgcccaggggaggatgtgacacatgcaggcatgcccagccgccaggcagcacctgcttagggacacagctgcagccaggacaaggggcattcttggctgctgcctcatggccaccgtagcagctgcctgggtgttttcccgcattttgggtgtgatgctgatgttgggaagtcctagtggggaagagccacccagggcctcctgtgctccttggtcagccaggctctgttctgtcaccatcaccaagcctcgacacacatcaggcttggcttcagggagcctcactcagtaacctgttttggcaattggtccaagaggcagagcaaattttagagccagggctcaaagtcaaatttatttcaatctatgaaagtgtatatgaggataaaaagaagagatgtaggtggggagcaaaggcaagggagaggaagggaggagagacgaggaagtactcacgtggacaagggcccaccccaactgaagcaacttcctttctcatcatacagattagaggggaacaagttttggctgcattagaaagagaaaaaaaaggaaaagtagaagaagaattttttttaaaaggtaaagaaagcaggccaagaaattacttaaaggctttctgaaggcctcatagctcatactacttgttccaagttatataagacacaggggaagagttacaggaaacatatgacaactaagcagaattccactctataataacatttttttctcatataacttctttaatccaaggatcttaaaacacttcacaaatttgcaacaattaaacctcatggcatagctgtgggaaagagtgttgttttgctcattttatgtgtaagtgagctacagcccagagcgtttgaaagaaaatgtttccagagcccgccaatgaaagtggcctgggtctgggtctcacagaaagcctgggctccactgcgtacatccagggaacttctgcttcaggggaagctctgcttccaggaagcctctcccagcggcctgcacctcaacaggcagacagcagatggtagaaaacggtcagctgggagaaggaaaggctctgctggcttacaacaaataaataagcaaatgaacaaataaagaaataataaaaatatataataaaatataatgtataataaacatttttaaataaaaatataaaagttatagttcactaaaattttattcttctttgcctcattttgttctccttttgctgttatatgtatgtgaaaaagcagccattcagaattttttttcccataatgagaaggaaactgggagctgtctttttccggggtggtgagaccatgggcctgtgtgcttgcatgtgagaggacaggggaagtgaggaaaggggagaaaagcctgtggagaagaggacagttgccttcttcatctcagttgaaagagccctggaaaatattgatctcacttttccctcagaatggtagaaagtatgagaactctgttgtggcctcaggaaccaggtctggcaggtggtacaacgtgccaggctggcagctgcgatggggagagtggatagtttgaccccagcacagccagggacagcagagcagcccacctgccctaccacctccatctgttacttggacagttgataccagcacacaggaaaggctgagaggagaaacagggcctctctcctcagcaagcttttccttcaagttgagattttccttcccaagttatgctttccacaactaaggatgccttgacccttcctgagggtcttgggctagaaggagataaagggcctaaggggtcggaggtgctgtgtcctattttcctcaatgcctgaaactcacttgatgtctttgcccctcagtttctgcatttgaaagacaggaataaagatattcacctctaaattctcaaggatattagaaagtcttttctttttctttctttctttctttctctttcttttctttcttctttctttctttttctttcttctttctcttccttccttccttctttctttcatctttctttccctcccaccctctctcttctttctttctttccttctctttctctctttcttttcctctttctttccttccttcctttcttcctttgagacagagtgttgctctgttgcccaggctgcagtgcaatgccatgatctcggctcactgcaacctctgcctcccgggttcaagcaattctcctgcctcagcctcccaagtagctgagattacatctgcctgccaccacacccggtgaattttttttgtatttttagtagagtcggggtttcaccatattggtcaggctcgtctcgaactcctgacctcaggtaatcagcccaccttggcctcccaaagtgctgggattgcaggtgtgagtctatgctacattcataaaagacgttcatcttcttcggcccaaagagctgaagctagtgaacctcaacgatggtgataccaacaattccttgctacaatctaacagtttgcaaagtgcttcccagaatctgctcccattaacccgggttgaggcaaagcttcacagatatttaacagtctcatggtagcactccatttgttttaactcaaagatctatcgaaggatgtcattgatttttattgagcttctcccccaaactcttaggggtaattctaaactatcactagcagaaactgatcatggctggactccactggccaggatagccagttctggtagtcagaactcgcacatgaaattgtaatgaatctacttcgtttgagtatttcagatgggttgtcaacatcaataaaattgcatagatagttctacctacctggcagcccagttcacctgggcctctcagagggtgtgttagggtctcggatcttgtcattgtgaatctgggcaatgcttctcctttcttctccattcctctcctcatcaccccctcctccggttttctaaatgcccaaaatataaagagcaatggaaccatacaagagagcttaattttgaaaggaggtgagctgcataaacagggatctttgtgtagttctggagaatattaatagtctgatcaagtttgttgtaaatatatttcccttatctcctctaacttggggactgtacagagggagagtcagggagagggagggggccttctggatttttgcccagggttactcagcagggacatggttttcctaaagttccagaagggaggggaggccactgcaagctccaccatgtgtcccagtatatcatgttgactcatgactagatcttgagaaaaactcacagaagtcaggaaattcctggcaaatgctctcatctcaccctctgctaaccttgcagggagagcataggtagggtcagatcggaggatgtttttaaaaggaaaaatcaaagcatgtctgtagcttctgcatgcctgtagtgggacaaagagtcctaacaggcctggctgaagatgcagaagcagcttcaagccccagtgaccagggacagccagcactggtatgtttcttcgttctagatttttatttctgcaaaagattttccccctctccttggcgttgtttccccatggggagtagcatctttctttttgagcaaagccaaatgaccaaggcaccacccccacccccttcaatggacagggccaaatttagagttggggttgctcatttaagctttgtatgtaattgagcctggcacaaagggttatcattagaaggaatggcatgaaatgaaggaatggaaaagctcagacccaaattagaaaagatgtcctgagggagagacacagtggcaaggctgggagctctggtctcagaggaattcttaggagaaaggactgggcattaaaagtgcctggatgggacaactagggaactgaatatggccctgccatctcttgggattatttgcttctaagtgcaagggcatggtggtaagaggtggcaacagacaccagaggcatcaattgttaagagccagcgtctgctcccagggcaccatggaatgctgaaataggattatcctcttaccagatgtttaccaagtgtgtccagggctgggcagtgttactttattccccaagcaaatggaaggtgctagaggactcagccagttccgctgacttactgaacatccttgtcggaaaccttgctgcctattgctttggggaatggagccatcacctccctcctctccagatggggtgtcctactgcttggttgctcagtgtgggttggggacttggcaagggaacaccatggaacaaaccaaggaggctttttctctgaggtgcctgtcccggctgacacatctgtcacccttggctccccccggaagtcctggagcttgatggtgtgaagagggcccaagtgaactccatacggctgggcgcagcttgcccgttcaccctgcaggatcagtcctcctgcctgcctatcctagctgtccccccgtcctcctggttgactcacgtgggagctggcagcagggggctgcagtcgttccctccgctcctcgccagactgtctctgctccccacattaatggtggtgtcctagctccatgtgaccccggcttctaatattcttgggttagttcagactatacagctggcccaactctaggcttcctagccttgttaaagccaaaatgctgtcttttactaccctgctctttccatcaagttcttcaagcaacccgagttttagaagctagatgactcttttggtgagctcttcctctgggggtagggagcctgggtttcagtagggcctggactgggctacatcattgttatttttttttaatggtagttttagaaaagaaggttcaaaggtgagtgaccctccaggaggaaggattaagtgggttgacttgggagccattcaacccaggaggcattgctaaggaacataatctattttgcatttcgtttcatgagccaaagtcagttatggcataggaatagctttctcatgctgtctctccctttctccattctacaaaaatattcatgccaaataatatgcaagttgtataaacatcccttcaaaaagcacataaagatattatatatagtcacatatgtctccttccaaatgggtgtgttcctagagatgcatagagatatctttcacaccctatatgtaaaaaacagccaatttaagaattggcagaacagccttgcctaagtgagtagaaaactttggctcagggctctccaaacaatcccataaaacccatgcttgcttttattgaatggtgatgcatgaaagaccaagggtggccaacttgaatgagggcaggagccagcgttcacaggattgtcataaagggtggcaggaaagtttctttttgctgaaattcaatctattcctagaaaaaaaaaattgcttccaatactggctggctggatgtcactcttatgttcacttctgctgcaacatcatttgagctcatcaatgttcaagatgttacttttacatttggtcttctcgcctccagcctcatcccatccatttcagcctccactccactggctgccaaagtaatctttttaaaaggcaaatcaaatctattactttcctacttaaaaccctttggtggctccccgttgcctgctaaagttcaaattccttagcttggtagacaaactccctcaaccttctgtcctccgttaccctttaagccattccatgaagtcccccagccccatggacgctccactccagccatttcagacggcctttgaggccacagtcttccaagcctcatgcatttgcacatgcaatttcctccactggcatattccctggggatatgagtggaacagtgatagcatctgtggtcagagcaagggggacaggaagatgatgtggtagagtggagggtggcacttttaactagggtggccagaaaagcacacttgagaaggtgactttgagtgaaggctgacggagatgagggagacagcctgcagatatctgagggaagagcatttcaggcagcaggaacagcaagtgtaaaggcactgaggtgggaatgtgcttggtgccttcaaggaatagttggagtagggtgagcaataaagggatgaggtgtctggaagttgggtgaggaccatggagctcttgacccaaacacttgccagtgttgccagtgggaatgagtgacctgagccagaaggttggctgtgaaatgcttggaggttgcaacactttgcttataatgcagatgagtgtaagagtggttctgaaagtgtcaggctctagactttactttctcccaacctgcatccacacagtctcaacaaagccattttactagaatttgacaccctgatgactaaaaaaccagacatctttgaggaggcattaatgtttagttagagtccaggactgggtaagtaatcctcatcctcaggagcctccggggtgcttaacccatacctgatctatcatgttctccatagcaatttattttatcagctcttcccattcccattttataaacatttatggtaatgccatatatagatctttcaagtgcttggacaaaattgtgaattaaggtgtcaaacttctcctccacctttttattgtggtaaagtatacacaacatgaaatttactattttaaccatttttaagtacatagttctgtggcattaagtacattcacacagttgggcaaccatcaccagaacttcatccttcccaacagaagctctgtatcctttaagcactaactccccctcattttgctttctgtctctatcaatttgaccactccaggaacttcatacaaaagaaatcatacaatgttttgtgtactggcctttgtgactggcttatttcacttggcagaggtctccaagtttatccatcttgtagcatatatcaaaatttccttcctttttaaagctgaacaatattccattgtatgtttgtgccacattttgtttattctttcattcatggataggcacttgggttgcttccaccttttgactctcgtgaataatattgttatgaacatgggtgtacaggtatctgctctcacttctttctcttcccttctttaaaggtagtctttgagcagaagcacctcttggctgcttgaatccatctggatggctgcccttctcccttgtcttgacttggctttattatcaattgatgatgaagtctgtttctgatgagctcaaccctcagccaccagaaaattaggctctgaatgatatatacagaaataaatgtgtgatgacttttctaatgtcactccttgggaaatcactagcactgctagaaacagagactagggatttccccagggctgggccttctcattctcagatggtggccccttaggggtcaaagccacagaagatggccagtattctgcctgggagagtcagtgggcacctcccagccagggctcctggacatctcttcggagatcctggtccattggctgcagcagagcctggatgaagccaaggccgtggtttcagctgcccctgggccaaccctcctgactcagtggctatagactgcattgctactctcaggcagctgacctaaacagcacttggacttgaacaaacaaaatgaaaattgtaaaagaaatttataatagaaaaaaatcacatgttttcaaaatagaggatgcccaaatatgagagagaatggaatgaactgaacaaacatgggtgttggaatcagccagatatagatcaagacatgggtcttatcagccatggggtttgtgcaagccatccaaattctgtgagcctcagcttccccatttacaaatggatatagggtcattaaatgaaaaaaaaataaaaaacatgaaacttgcttttattgagcagaccttattgcatattagaatcacctggagaacttttaaaacctaggatgtctgggtatgactcctagagatactgatttaattggtcaggggcaccgatagtgtttataaaactccccaggtgattttaatgtgcagtcaaggtggcatataactggcctagagtgtagcagaccctcctcaaatattagctttcctcagtcctcctcccatgcctgcaaaaactctagaaagcacatgccctccctcacatggaatagccttggcatcagctgccttggttcatatcacagctctgtgccagtgaccagggttcctaacatagccgagcctcaatttcctcaatggtaagatgggattgatgacagaaaccacttctagttttctgtgaagattagaagagataacgcatggcttggagttagagagtacacaataaatgtcagctcttattgtgagcatggtcagtgtcaagtcaagaatcccatcatttccactgcagccagcccttctcaccccctccctccccaaaccccaaagcagagaaaccaaccctcctgttccctgcagagggctggtcagttccagctctcctgctgagccatgttcctaggagatgcctggtgagaacttgggatcagattgagtcagaggtatttgtagacttgactcaccaggtcttaaaaccagaagattgccctgtgggtctcatgacattcctggaaaataaaagaagtgaatattattgggctgagttcatcagacactcagccctcccttttgtatgccggtgcttctgaagagagcaggcagcaacttagccaagtctgaaccatcaaaggcaatggcctggttgcagtgcagggagatgttgcttctcctgaagacaggtctgttcctctttccattcctcttctcttccagtcccccaaggctatcgactttctcctccttccaggttcctgggaaaatgtttctgagggctgcctctggtgaggtgtgtcagagctgagctattttcgagggctgggtgtgggctgggaaggggccacccatattccaaagaataagaaagggaaagttccccttctggagccaggatttctggaaccttgcactgaagccccagccaggtaggggacccatttctctgaggccttctttccccacactgcgtcacatccctaacaatagtaagtcctgttgtttccacatcccaactatctctagaatctacttctctgtatctccagagccacaaccctagcaaaagccactgccattttataatttctcacctgcaactgcaacctcctgtttctactgtttctattctctctacccttgtcttcccaacctgccaccggcaggcaggtaaaattttcaaaatataaaactgatcatgacacatacacgcatatgcacatttaagcttaatactctttcaaagcttcacattgctcttgggataaaggcaaaacctctaacaagtctgacaaggtcatgtagatcaagatttggtttggctatgagtgacagaaaacccaagttaataggggtttgaatagataaggttttcttttctatgtgaagagtctgcatttcaaccagtgaggattggcacagcaactccttaaagtgatgggggactcagactacttgagttatctgctctgtcatccttagtatgcagttttcacttcacaatccaagagggctgcttgagctccagccattgcaaccaaatctcagctcacaggaaggaggaattgcacacagcacttctacttgcatccttctgtgcagaatttagtcacatggctacaggtagctgaaagagaggctggaaaatgtaataatatttttttccaagtggccatagcccaccaaaaatggaggaagaaggggagaatagatattgagtgataactggcagtgtaaatcatatagtactcctctcctgagcatcattatacctcatgccttcttcccttggctctctccactccagacacactggctttctccagatgttccacacatttgcaatactccctcctgccataggcccttgctcatgcttcagtgttctctcctccctcctacttaattactaatccttcagaactccactcaagcagagttccctcaaagaaccttccagaggtcagatcctcatatttagaagggattttttatcctcctcttgtatgtttagcttataacatgtagattctgtcactgttgcaatcacacatttgttttgtatgactattttctgcacatcatctgtcccatgatgaggacagaatttaggcttggttttgtgcactatggagcatcctgcctggcacacagtaggtgctcaataagtatttcttgaatgaatcaatgaataaatttagatattacctaaaatgtattaaagggggaccaagaattaggcaaagggttttcctggggcaagtcatagggagtggctgagaggggttgggagatgcattctaaatagtccatccaaatctagtaggctttaggtgtggcagagaaagtgttgacctggaactcagaagacctgttttctgatctcagctcagccatcaacagctgggccactgcctagagacagaaatggtcagatgttgggtatattttgaaggtagagttgacaacaattgctgacagattggatgtgggaattgagggaaagagaagggtcaaggattagtcctgggtgtttggctgaacacacagaaggccatttatggagaaggggaagacagtgaaaggaatagcttttaaggagagggtctgaaactcttatttgcaaatgagccacatgttcccatagccagatgcacacttcaactcttccacagaggaagcctaagccccaggctggggggtgtcagtggtggagaatactaaatggatgtaaaaaaagttaactgaaccccaccccatccccccagaaaatgcccaaacaactggactttcaaggtgcatagttaccagccaagttattcagcttaactcagcaacaagattgaagagaaagtggtcagaagaccttgatactaggcttggtaggaagcagtcactttgggctcaaaagtcagtgatgagggaaggcatatccatgcatagtcactgcagaaatctttgaaaattaagaaaattacaatcccagtacatgcctcacatgcctaacatcaccatgtattttctcccaatctttattgtacacattttcctgtaagcagtggcactcatctgaataatgtgatttggcaatttccctttctcactaaacattatcatacatgtttctaagttgctttctaaacaggctgtactgatctactcaactagaatcagtatattagaatgcttctctcctggcaatcttgttcacaatgagcgttagcaaaagaatactttgacaattttataagtgagaaatagtaattcattattattttaatttgcaggtttaaaaaaatttctagagagcctgaacacttctcaaatgcttgttagttacatttttttttcaagtgacctttgcaaagatatttctagacgtggaaggaaccagaataaccaatatttagttaaatcccacttccttcacctcaagaagcagcatctctcccttcaaaaaccaaccatatgtatgagggggatgggggtggcaaagcagagagaaagaagtgctgtggtagaaagtttgcactcaactgctgcgtggcaatggctcaccgccagcctctagtccaccttcttgtgaatgagggtgaaagctttataagcaaatcagtgctaactatagctggtggatgtctgctgtgcagctcttttggatttccgccctaatctgatctgccatctgggttttgatatgcacagagaggcagtctgttttggtgagatctacaccccgtgtgctctcccactgactctgtgggaggacagagagtccacagcccgatctgctccttcaggtagggactctgcctggtttggctgtgtcttagaatatagtgtagcacctggcacacagtaggttcttatacatatttgttctgtgactgagtgatcaggatcctgaagggataactaggagagaggagacgctgttctctctgttctcacttctattctcagctgtgtcactaaacagtaagtcactttctctcactggcctctacttcctcgttttaagcaattaatccaaaacggcagcaaagatttcttctaactctgaaattgtgtgaaaacttttaacccatctttgctttagtttcttcatctatgaaataggcaggatgaaaatgtcaatctcctatgagggtacccgataaaatacaggatgcacagttaaatttgaatatcagataaacaagaaacacattttttcaaagtataaatatgtacccaatattgcataggttcgataaataactggagtgctggatgaccaaacaacatgcagctggatctgtttattgcatttagagttgtgtttctagactatgatgattacatggtgttcaatcaacaagtatttattaagaatctactatactccaggcactgttgaggccctggtgatacagcagagaatgaaataagcaatgtccctgttttcactgggcttaaattctagctaacaaaaggttcacaaaatgtcatgtagtcttcatgctcagaaggctagcaaagcaggctaagggccagagaccatgtggagggctgagaaagggagttaaggaggctgaggaacccaactctgtgcacctgaaagcccccaacctccacacagacctgtgtttgtacagcaagactgtgatattattttgtagcaatccccaaagctgcataaaaatgtcattgattcaaaaagctcgtgcaccaaatttgggataaaatgagcagtagcttggatggaagagacctataaatcatttagccaattttagctgagctagggctgcaaccaactttcctgacagccaggagaaagttctgggaggtgatgtggcttgtgaaaaagtgattctgattttcagttctgtttaccagtgtggttgggttaagtcttgacaacttttgtacatgttttaaagttttagctgaaacaacagtgaagcatttttctttgagacatttttaccctcactgagccagtgctctttggttcaaggttttgctggggcctattaagtgaatggctgtagaggtcttcttttcttctcttctcttctcttctcttctcttctcttctcttctcttctcttctcttctgttctcttctcttctcttctcttttctcttttcagatggaatctcgccgtgttacccaggttggagtgcagtggcgcgatctcagctcactgcaacctccgcctcccgggttcaagagattctcctgcctcagcctccgagtagctggcatcacaggtgcttgccaccatacccagctaatttttgtatttttagtagagacagggtttcaccatgttggccaggctggtctcgaactcctgacctcataatccgcctgcctcggcctcccaaagtgctgggattacagacgtgagccaccgcgcccagccgaggtcacctttcttatacctctggtagcccagagaaatctcagcatcattgctatcaccacctttatgatggcattaggtctctaggttgcttctaccctagaatattctgtgtgcttgcctctatttcattttacacattagacttctatttggtttaatatagagattttattgtctgctacgagaattggatatgtgaagctcattaacatttctcaagtaaaactagagaaaacagtttgtggagtttcttttttatcattttcaattcatagtggttgggttcttagaactagccatgattcttggtttataaaagaaaataatcacagacacctggggatatatagctttggtgggggagaggcagttctgtgaaagtcaacagcagaaagtacccatgagctttttgtttgtgagacagggtctcaccctattgcccaggctggagcatagtcatgtgatcatggctcactgcagcctcaacctcctaggctcaagtaatgctcccacctcacttcctgagtggctgggactatgggcacatgccaccaagttttttgtagagatggggtttcaccatgttgcccaggctgggctcaaactcctggactcaagcaatctatctgtcttggcttcccaaagtgctgggcttgcaggcctgcaccaccatgcctggccccatgaactttttccatcagagaagctcttaggcacattgctggcttctcctcaaatgctgtcacccaaggaataattgcctttctgatcccctcagacacaattcccacacaaactggacatctgaacatctggggcctgtgagctctgtgagaacgttgttggacactggagtcgggagggatgagggaccaacctctccccagatgactagggcttctctgaatctgagccagacaccagatgaaggaacagctcacccatgacgagggtgagagcacacatgttcacaggcagcgggggatatgtttactcactgactctttcatcaggtcatcctccccaagataataagctgaggtactcgagcaagttctgcctttgaaaagcttggaatccccaaagggcggggcaccagggtgggcactcaaacggacaatgcagaaagccaagcgcagacggttctagctggaaccgggagagaagcctccaaacctggctccagtaaaactcagaaatgtttccagggtgagcatggaccatctccccaaaggcggtgaccagggtggctgagatagctcagttaaggtagctcgcattcatgtggctcctttgatctgaggttggtaaaccttgttaccatatccagtcacaaagagctgccacctgctttctacctggaagctcaagggattaggggagaactaacaaaagtcggtctgtaaagtgcttccagatttttaagtgcgtccactgtgaacttagatcaatgcttcaagctgcagacttttgaaggcagaatgatctgttctgaagggtcccagaggctattggccccaaccttcttatataaatgggaggatgtaaccaagtctccaaggagggatggggcttgcccgaggtcccatggcattttctggcagagcaagaatcagcactaaggtctcctggctcccggccctgaactctttctcctccaccctgagagcctcgctctgctggggaggtggagggtcatctgtttaacacagttctgtttttggcaatcttggggaaggcccttcttgtcatagtcttcagggctgtccttggcaagattgcctccaaataagctgcagcatggtcccctgcctggacgtccatctctgtcttcacacccgtgccacctttcgagaccaagtggagagctaggtcaggatgccttcttggacttgctgatcttctctgcccctgagtacctaggctctgtaccacaccctcttcactttgttctccagtcattaactgctcatataaccctcttttccttactgaactgcaagctctgatgggtaggaaatacatttccaccttctcattcgtttaagcacctagcatggagctgggcatagagttggcgcacaataaatgctgatgagcatgcatgcctgagtgactctctggtttcttccttgacagattcagagcccagtaccttggactcccagtcttcgaccaccttgttcctctcctcggaggagccaggcccctccaccgccgccctgccatctccctcctcctcttcctgcgagcctcaggccttttccccaggtccgccagcgctgcctccgctgttgcctccgctccccgcagcctcggcgcccccaggccccggcgcctcccggcgcacaggccgctactcagtcgtcgcctcctccccggaggccgccccgcgtctggtcgactggctccccggttgcccttcgaccatctctcccagcacacgcggggatgacaaggagcggccgccgcccgtcctggcaccggccgagggcccggaaaggagccgcgccccgcgccccagcactgcgggcagggaggagggcaccgtggacgcgggtacatccccgccgccccgagcccggcccgccgctgcggcgagcttggaggcccacgtcggggacatcctggtggagctgcggaccatgaacggccacctggacagcatagcgcgggccctcaccaaactggcttcgtccctggggccccagcctgagcccctgccagatgtttcggatgccaactaatggagctcggcgaggctgggccgccccggggccgagggatcgcttgcaccaggcatccctgcctgtccctccccagcagcgaagcgcgcccagcggaggagcggttgctctgcgcagctgcctagcggaaagcacggccctagcgtttcagcgtgaaacagacccggttgcgcctcacaccctcctcctccgctctctcacggcggcccctgccccggcttcctggcccttcacatgcccttctcttgtcttgagcgtctagcagaaaaagtgcctggaaacggcggtggcaccctgcgaaggatgcttagagaaacactctttcacatcccattcctgcgacttccgcgtggcgtggagggagaggagctcaaagcaagtcgccaaagcagcagcgaggccagctccagcgttggtggggcatccatctctggtgacgttcacaagtttgtttgtttttaaaatcgtttttggaaaaatatttttttttcctcataagcacatttcaagaagtttggaaaatagagaaatgaaacaaaatctggtgtatttgtggaaaaggggggtatttaagtctttcttatgagtaagaaagtattttgtgtaataaaaaaaatgtatatccac

SEQ ID NO: 153 - DNA, 312257 bp, Homo sapiens
cttctccctcctgccgccttatgaacagggtgactgtttccccatcggccatgattttaagtttcctgaggcctccccagtcatgctgaactgtgagtcaattaaacttctttcctttataaattacccagtctcggttagtatctttatagtggtgtgagaatggactaatacactggcaatatgcatgttagttgttttaattgtcataagacaataatacaagtattagaaaaatacatatgataaactctatattcaattgagtacggtaaaggaaatcacccattctgttgctttccctatattcctcaggtactgagaaagaaattaacgggttggtataaaatgtagctttgctggccgggcgcggtggctcacacttgtaattccagcactttgggaggccaaggcgggtggattacctgaggtcgggagttcaagaccagcctaaccaacatggagaaaccccatctctactaaaaatacaaaattagccgggggtagtggcgcatgcctgtaatccaagctactcggggggctgaggcaggagaatcgcttgaacacgggaggcggaggatgcggtgagcggagatccgccattgcactccagcctggatttctggctgtaaattgggagaaagcaaaaataattttgcactggatccttattcagctacctagcttttaaaactaaaagttataagtaaataacttcccaatctttaaaacttaaaatttcatacagaataattttaaaacactgcttaatattatctacttactaccttatcagactctccgcagttttacagcctgttagaaaagcaatcaaagtaatcaacatatatgtactgagtattttatacagcaaacactctttctcaggatatattggagatttagttttgatgacaaaggaggttcttttcctgaacacaccttaattaagacattatttgtcttttgagggcagcctcctaagtctgtacaggttttagagattcatgccagaattatgtaagcaacaccacccccatgtgcttctgttagcacaagctttctgcggtcagagatggaagcacaggctgctgtcatggaatgcactgagcaaaataaaggagtgctctgtaaagaacttggctgaagtgtctattttcttagttccaggacctgacaactctctttttcttttgcatgtcattctgcttatgtgaatttttctctttgcctcttgggactccctatcttattctaaaatgtgcttttctcccttggggtgaaatactaaatttcttgaagtctgagatgactgggtccacagaggccaattcataattgaaacttaatataggtggccattgacacttcttgagattcaatcccagaggatggaagaaagagagagggaagatgtatgctctgttacctcaatgtttgttgttgttgttgttgttgtttgtttgttttttgagactgagtctccctctgttgcccaggctggagtgcagtggcgtggtctcagctcactgcaacctctgcctcccaggttcaagcaattctcttgcctcagcctcccgagtagctgggattacaggcacgtgccactatgcctggttaatttttgtatttttagtagggacagggtttcaccatgttggccaggctagtctcaaactcctgggctcaagtgatccacccaccttggcgtcccaaagtgctgggattacaggcgtgagccaccgcaattggcctgttaactcaattttgaaaatgtgtgggtaagtgtgagcccaggttttaaaagatttggatatttctgcagctgtgaaaggtaaggaagcagaatactagcccctactcctgaacccaaaaaacccatggatggtgtgacatggaaatatcaagactagttaattattgagcagagagtctcccaggtctggtatgtagcagcagaaaatgagtgtgtgagaagctctaaagaagatgggactcaccaaatgtcagaccagcctgtctgtgttagagaaagaacccctgttttttcagatttttctcttggccatcctggactacacaagatgttaaaaactttctagtgttttcatgcttcatgtataccatctcatgccattaaagtatgtattattttttattgcaagcacaggacaatccactcattcaattccctacttacccatccaccttctttgctttccatcttctcatcagtacttcataccctcccaacttattatttttgtttgtttgtttcctatatattttcctgcacatagtaggtgctcacttcccaacttattacataaatggaaacaaaaatatgaaatcatagaactttttttgatcagtaagtgaccattttttaatcagtaagtgtgctgttttgctatgtccttaggaactcagaaagtctttgaaataactcatactgatacttaatattcattgcacaccaaatatatgacagctcctctactaaatgttttctacagatagtctcatttaatcctcacaacaagtccatggggtaggttctaataaaatcctcttttttttttttttttttgagactgaggctggagtgcagtggcgcgatctcggctcactgcaagctccgcctcctgggtgcacgccattgtcctgcctcagcctcctggtagctgagactacaggcactcaccaccacgcccagctaattttttgtatttttagtagagatggggtttcaccatgttggccaggttggtctcaaactcctgacctcaagtgatccaccagcctcggcctcccaaagtgctgggattacaggcgtgagccactgtgccctgccaaaatcctctttttataggcaaggaactcagctctctaggaaggttaagtcagtggtacaaggtcatgtactggacaagccatggggccaggcttggaacccagtcactgactactgagggcatctgcctcctaggaccatccagtttgcccagaagcacaaggtcactcatgcacatgctggaagaagacaatctagagcaagagcttgttctttgggagcaccccactttctttttcttttgttgttgtttttgagacagagtctcgctctgtcacccaggctggagtgcagtggcacaatctcagctcaccgcaacctccacctcccaggttcaagtgattctcctgcctcagcctcctgaatagctgggattacaggcatgcaccaccacacccaactactttttgtattttcagtagagatagggtttcagcaggttggtcagactggtcttgaactcctgacctcaagtgatctccctgcctcagcctcccaaagtgctgggattacaggcatgagccactgcacctggacctcactttctcggtgttgctgttggagaccacacccagccccctcctgagcagcagggatctagggctcattcctgtaacttggtggttgccattacatccttgcttttcttctgcaggcattggtgattgcacctgctttcctctttcttctcaacatcactgcctatcatttggttcattgctgggttttccttgctcccaaactgggagtgtagtagcttatttttcagattcctttgtaggttttattctggaagccaacacccagaccctttgtttttatccatgtattttgtttcatttcattcaacacgatgattgactctttgatttgctggagacctttgctatggtaaatattaaattgcaacaccacaggtgggcaaccaaaaagtaacctggcaagtcgtggagctctagagtattggaactacatcaatgaattcttacatgcccagggcctaaaacggtcagcacaaagcctcttgatgagcatttgttaatgaaagtatatgtttgtaaacatttctgcaaatttgtaaatatcccttgcccttcctgaaatgtaagtgggcctagaattgaagtcttgctgaagtctgtttcttgcctcctttctcagatggcctgtaagagacattctactctcttttcattcattcctggaagcgagcttgtatcttctctttccctaggtccttcttaagacacccatagggccggactgacatctggtggaggacaggagacctttaacctggtgtctttcttagagttcagagagaataaagtatgggtttaccccaaggatggaggagaggcagagacctttttaattttttttacaagatctgaggtcaccgaaccaccataaaatgaatcaagccaaatcctcaggattccagactctagaaagtttctcactgacaatatcaatagttattgaacatctatgatgtgtcacgcacatgctaagtgttttctgagctgtgaaaggaagatatcttgggccctccaaatcactaaggaaaactcaagctggaaactgcttagggcaaacctgcctcccattctattcaaagtcaccccttgctcactgagatagatgcatatctgatttcctcctttggaaaggctaatcagaaactcaagatgatataaccatttgtgtctcacctatctgtggcctggatgctccctcccgcttggagtcttcctgcccttgcttcaagttgttccacctttccagaccaaaccaatgtacttcttacatatattgattgaggtctcatgtctccctaaaatatataaaatcaagctgtgccccaaccatcttgggcacatgtcgtcaggacttcctgaggctgtgtcatggatgtgtcctcaaccttggcaaaataagctttctaaattaactgagacctgtctgagatgttctgggttcacggtacattatgaagtatattatttactttgtgtacatagtcccatgtaatcactttctaatacctctcacaatgcttcatcaattccaccttaaacttttttttttttttttttagacaatgtttttctgtcacccaggctggagtggctggagtgcagtggtgtgatctcagctcactgcaatctctgcctccgggattcaagctattctcccacctcagcctcctgagtagctgggactgcagcctccaccaccacgcctggctaatttttgtatttttagtagagacagggtttcaccatgttggcccggttggtctcaaactcctgacctcaagtgatccaccagcctcggcctcccaaagtgctgggattacaggtgtgagccactgcacctggcccaattccatcttatattttgatcttttacctcccctttgacctccaacatgtaaaacaactagtcataaggtcagggctctgtgttacagctggactttgcactgacacatatgtgcacacacacactcatacacacacatttgaaggaaaaaacacattcatcttaattcaggatgtgagagttgctgctgtcttttaattcctgacaactccttcattcttggatgtgttgtgcctttcttatgtgaattagaagtccagaagaatgtgttggagtttttactcaggtgaatgtgtcatccagccagcttagaaagactgcctagccaagttactgactacctcaaagtttcatcaggagagaaagtagctgtgaacaattcaagatcattagtgccagagcaaaaacagctcaatggctgtgcatatttatggttgtgtaatacaatgcccataattgttagggggcttcctgattccagctccctcccagttgtctgaagggggagcagaatgcacacatcaccctttagccaatttcaaccagggactgaagtactctcttcttactagtaggaaatggcttctgttcacatcaactacatcatggatgactttggatgatgtaaacctcttaatatgaaaaagattaagtccagaaacaaagcatgccttggttcatctggcaactctggtgaggtcaatcggagggtctgtaagggctgacacccctccttgcgtgaacagagactgcctctcatttgcccccgctcctaacccctgccaccccaaaaagaattctaccacaaaaaataaaaatacaagttctcattcaataccctcctttttttggtggaaacatttctttacagttaatgtctagactctagattaagttcacgtaaagcttccctttttaaaaattcatgctgactaggagttaaagtgcaaggctatttccttttgatctccttgccgtttgttctccatgaccaccaactgactttgcctgtcttttactgtttccttccccatttttactcacaatctgttacgtctccttatcagcttctggcagcctcttccagcgctcattgaatgctgagctctctctatgggatgctggctacaatgggggtctctgagatgctggctacactggggacaagcataaatatgagtgtgggggcaaaactgtacaatggaagcagcactgtggagctcatttggagaggctgtatctgctggtggattcctgtaggatgacagatgggaaagacagccaaaagtcagcacccgggcagcagaaagatatatccagaagcaagtccaggtgctggtattggacctgaattggagatagagccaaaaagcataatctacacaatgcatttggtggaaatacattaggagacaaaatgaaaaatggaaaggggccgggcgctgtcgctcacatctgtaatcccaacactttgggaggctgaggcaagcggatcacttgaggccaggagttgagaccagcctggcccacatggtgaaaccatgtctctactaaaaatacaataattaggtgggcgtggtgatgcatacctgtaatctcagctactcagaggctgaggtgggagaatcacttaaatcctggaggcagaggttgcagtgagctgagatcatgccactgcactccagcctgggcaacagagtgagacttcgtcttaaaaaaaacacaaacaagaaaaaaacaacaacaaaaacaaatctgcaaaactgtgtgcagagtttctggaaagctacagggcattattctgctgaaagactaactcccaggtttacacagcgacgatgatggcagacctggaacatgaatcaggtgtttctgacttcaggaccagtacttttgttcactacatttttcatcagcttagggcgaagcactgaaggtgcctcctgcaaggatcaatgctaaggtacaaggactcaggattgaataatgtattagccttgggcttttacagattaaggatgttgggaaattacagaaccacagtatgaagctctagagggagtgctggagggtcagagcagtgagatgtgctgtaaataggaaaacaaatcatgaggtcagaagtcaaaagaagagaatagggcagaagcatagagccacagaatttacactaggaaaagggctcaagctggagactgaaccataggaggatgctagaagccagctttcatctgatgtgggttaagggggccaccaggatagagaggacccaacagggtagacttgagacaagggatgaggatatcagagaaaccaccaaaacttcctacaaatactagcccaaaatgtctttgccatgactatgaagagtggaaatgtccaatagatcaagactaggtaaattatcacttggggtgatcatatttgggattcttggttattccagaaagatcaaccccaattcttctgagcaccaatcatatgtattttaattgttcactcagctctcaatggtatagacatacaaatagctgcctatactattgaattattaaatgcacattgttgaatatatttttcgatcccccagtacctattcctattcttttgctaaacctgtattttgggagtaaattgcctttccttcattttgtgtggttcttgtgagatatctatcatggtgccccagtctctcctagtgaaaatgagtcccatacccaagctataccaattaacattcccttccaggactttgaattttgagcagaagaatataaaggtatagaaaagagttgaagtttattcacccaggtggttccccaggcctgtcttggttgctttcctctctgagcatggtcctagagcttttggatgaaatctgtggactatagtggcctttcgtgacgtagggagtaaataactcatgattaggacaaggtggttgagtaagcttggaagagcccacggtatcaattccacagaggaagtggagaccaagcaccagacacagaatcaggcatctgccaaagaattcaagcaagaatgcaagcaatcagattcagaaggtgtactgtggaaaagattgcctgattaattcagaaaagagtggtagatcagtcataatgtttcttgcttgcaagtgacagaaaaccagcttgaaccagttttaagagaaaagaaaaaggctgtattgctttagttaaccacattgcaacaggaacaatgattaaataatttatcatccacctggggcacttccgagactgaaagagctacacttctgagaaggaaagttaatgattaagctggaacaacaggtgtaaactgggacaaatgggccctatacccatttggatgtcttctcatcctagtgtaaggaagttatgatgaataaacctgaaaggctgcctgccaggggtctatctctctctctgtatctttctctttgtctctctctctttgtgtgtgtgtatgcacagctgacagaagctctgggctcgaattcttacaggttaccaatcagaaaggaaaggatacttcttttgtttgctccagtgtaaaatatcttgtccaagaattccaagtagtctgacctacatcacatactatccctgggccaatttctgtggataaagagatggattcctaacctaccatgggttcatctgggtcacatgtgtttactgtgttgaagacataggagtcctatgaatccatagtcccaataatttggagcagcacttccttgaaagaaaggcttttctggaagacaaaaccataaatatccactcaggcagccttttatagagtgtctctgccaagtccacttgcagtatgggaaccgttaagtgttacataaaacattctggagctacctgggaaaggattgaaccatgacccttgagaccttggaagccctttgcaatctgctttaacaaagagccatggggccgctctatccctttatagtcttgtatataattgcccattgcgggtatgtgagtccccagggctcagtgttcctataagccactagcacctctcaaatgaaatgatggtggtaatgtagggagaggaatagatctgattttgtggtgctcttctcatttggctttgccctgaaaagccactggcagagccacagcaccctgggcaccttgggctttcattgaggagttggggaacagaaaggaaagcaaggactccatagaaaaactttacgaaagagggcagctagaggcagacttcccttccaaccaagattggctaggctcccagttctacctgccccggctcctgtttcagctccattgttggaaagtacaactgtgatggttaatactgagtgtcaacttgattggattgaaggatgtaaagtattaatcctgggtgtgtctgcaagggtgttgccaaaggagattaacatttgagtcagtgggctgggagaggcagaccccccttaatctggatgggcaccatccagatcagctgccagcgaatatgaagcaggcagaaaaatgtgaaaaggttagactggcctagcctcccaggctacatctttctcccatgctgcatgcttcctgccctgaaatatcgaactccaaatttcttcagttttggactcgaactagctctccttgctcctcagcctgcagatggcctattgtgggaccttatgattgtgtttctgagttaatacttaataatctctcccttatatatgtgtgtgtgtgtgtgtatatacacactatatattctgttcctctagagaaccctaattcaacaaccgtttatgatgaaacttggaacaaagagaggcgctactttttgccaccgtgataggatcctctctaccttgcagaagagttcttggtggctaaaactcaacaagaatctgcttgtccccagcccagactttctctgggagaaaaggaatggataaacgtatggaagattgattgagtgactgtgggctcccacccaaagagatgattcagtccagtggcagggagaagagtgagacccagtggaacgtgatttcgcaatgggcccgttgccacgacagggaacacactgtttactaaagagagctcttcaacctctcagtcatctttgccttccagaaaactgcagcctcaactctagtaagtaatccaccggctcagcccaagccctgttggagcggatagggctatccttgccacagtactgaacagcaggaatgttgctcgcaaagcctgccctttggaagtagccagcaaggctgaaagtgctcaaccactctttggaatgccacattgtatatgggaagttccataatgcgctactaataagtaaagtttctcttgctgggttgtaagtatctgggcaagtcacaggaaattcttcttggaactaagcaatatgggaataaacacacgtattaacatctgctcatgataactagctaatgaaatagcccactttggcccagagttcgggataatgaaacaaatgactggtggttaataaatcgcttcagtgccggtatatgttcactgtacatcttgtgtgtcccgtgtgttcatttgttctttcaattgattcttctttcattgtccaagacacagtctttgtttttaaactttttattcacatatgcactggttgctgtggcctccttctggactgagacactcatttacctggctgctaggagtgctggtggtcagtagctctcatctgagcctctctccaaaaatgacctctgctaaagagagctgcctggttcaaggtcatgctcccttccctatggtagcccacaattttaaagaaaggactgactacattgcaaatacttgaagacacctcttaaaaaattgatatgtaatcaatgtggacatgtaaagacccagcccttaaagcccaatttaagataacctggaagggccacttgctggctacttccacagggcagggtttgtagcggaaaagccatcacagctccagagtttccagtgggcttgactgaggcctttgactgtctctcagttcatctgcttgctgtgctcattgctgcctttcttctttcacagatactgttcctaagagcatctgccccagtcaacttctcatccacagatattaatctcagtcaacctccaggtaacctgacccctgatgctatataacgtaaaccctgaaaagtggccaggagcgatgactcatgtctgtaatcccagagctttgggaggctgaggcaggaggatcccttgaggccaggagtttgagaacagccagggcaacatagcaagtccctgtctctgcaaaaataattacaaattagccagatgtggaggtaactacttggaggctgagtggggaggatcacttgaactcaggagtttttggttacagtgaactatgatggtgagaccctgtgtcaaaaaagaaaaaaatgaaagtgccttgattataatggtaccacttcatgaattttacaaaatgaacacacctgtatgaccagcctccacctcccttctaacctaagggtaaccactgttatcactcctaacagtacagatttgtttttacctgttctagggctttgtctaaacggtattatatagtgtacattgtttttgtgtttggcttccattactcaacatcttgtcggtgggattcattcacgttgtgtgaggctgtacaatcattcccatttcttttcttttctttttttttttttttgagacggagtctcactctgccgcctgggctggagtacagtggtgcaatctcagctcgctgcaagctccacctcccgggttcatgccattctcctgcttcagcctcccgagtagctgggactacaggcgcccgccaccatgcccagctaattttttgtatttttagtagagacggagtttcaccatgttagccaggatggcctcgatctcctgacctcgtgatccacccgcctcggcctctcaaagtgctgggattacaggcatgagccactgcacccagccaattcattcccatttctatgtaatattccatgtgggaatataataccatttatttttctattcttaggttgatgaatattgggtagttccagtttgaggcaattatacatctgtagtgagcatactagaatatgtttttggatgggcctaagcactcattgctgtagggaactgcatatatttagtttgtgtagatactgccaagcagttttccaaagtggttgtaccaatttatactgccacttgcagtgtatgagcattaagaccaatacctggtgttttctccacccttttcatctcagccactgtggtgagtgtgtggtggtagtatattgtggttttaatttggacttccctggaggccagtgacactaagcacattttatatgtttattggttatttggacattctccttggaggatgtctatttgagtctttgcccattttctgttggtttgtcaagacagtcttttctttaccgttggctgctgggagatcctacagaggccatctctggaggagagggaaagaggagtcatattttgtttaaggacaaaagtaagaaacagataaataaaacatacagagaagcatgtaggaaataataaacacgggcttcaaagctgctggagaagggaagaaatgagattcatccacaacagcaaagtcatagacttgaatggggaaaagtaaattgaggtggggttgaggaagccacagaaaaagatgaggtccaggccagtcgcggtggctcacgcctgtaatcccagcactttgggaggccgaggcaagtggatcacctgaggtcaggagttcaagaacagcctaactaacatggtgaaagcccatctctacaaaaaaatacaaaaattagccaggcatgatggcaggtacctgtaatcctagctacttgggagactgaggtgggagaatcacttgaacccaggaggcggaggttgcagtgagctgaaatcatgtaattgcattccagcctgggtgacagagtgagactctgtcttaaaaaaaaaaaagaaagaaaaagaaaaagattgagtccagctattggactcaggaaagacaaagtggtagctttgggtgggtgccagcaagaatcacgaaaatccactcagctgatgagactgtgtgattgtaagaatagttagagaaggctgtgtttaccagctggtatacaaaaaagaagttagaataaaacacaatgactgttactggtcttgtgtatccaggcagagtcacgagctgagtaaatagatagcatggctttagaagagaaggtgtatatttttttcaggctcactgaaccactacatgtgagaaataacaagggcagagtgacctggaacacaaaaacgtcattattcctgcagctctgctcctggggagtagcccacaatcacaagcagcaggaggggagtggagtcacatctatagtggctttgcaatcttttactgcctactacaaaattggccctcttcacactgcatcttcagcatgggacctgtccttatcctggaaatagcttttctttgctaaatattgcagcctggctcgaccccgaacatccgctcggttcagtcacttggagtttccttctttctgccagatcaatcatctgctcctgttgtatcagtgaatgtgattagaattatctccctttgttgggaagacagactctaatggtgtagagttctattttgtttttgttttttctttgagcagaaacatgggcaccatgacattcttctgtgaaaatccagcataataatcttcagttggctaaagttaggatgtactattaactgtttcacttccacttggttataagccagtgattttgaagtttatgactgtgacccatgggagagtgttcaatatgggacctgtccttactgccacagggaattttgaaaatactgtagatcttgcttttctgtcagtttgacctgaaaggagttcttcatgttggaatactattgggagttccatatagggtcatcatattgcgtcctcatagctgaccctaaaaactgggattctctttaacctttccaaatccccatctgaggacttgtgctctggacaagaccttattgtttgcaagaatagactgtcttgagagaacctttttattttagggatggagccagaatgaagttactttccacaaacctattctaacctattgatcctgcaggaaccattttcctattggtagaagggactgcagagaaaagttactctctcatttactcatttgcttatttggtgaatttttttttttttttttgacagagtttcgctattttgcccaggctggagtgaagtggcacgatctcagctcactgcaacctccatcccctggggttcaagcaattctcctgcctcagcctcctgagtagctgggattatagacacctgccaccatgcccagctaattttttgtttgttcgtttgtttttgtatttttagtggagaccgggtttcatgatgttggtcaggctggtctcaaactcctgacctcaggtgatccacccccctcggcctcccaaagtgctaggattacaggtgtcagccaccgtgcccgccccatttggtgatatttttattgagcatctgctatgtgtctggtgctttgcaccctagagacacagcagaaaagagccagacatagtacctttgtgaagcttttattctagtgggtgagatagacattaatctagtggcttcaataaaatgtaacaataaggaagcacagatatctttctctcagaggggttaaacttgttctgtgcttttgcttttgttgtctaatagaaagcagtaattctcttttctaccaataacttggagaaaaaaaaaagtagtaattgaaaaactctaagcggaggttctgcagcagtggttctcaagcaggcctgattttgtccccagggggcatttggcaatgtctccaaagatatttggtcatcacaactgagtactactagcatctggtgcgttaagctttttataatgaacaggatggcccaaaatgtcagcaacacaagggttagaaactgctgtctatatcatatgggtaatactttaatttgagacggagttttgctcttccgcccaggctggagtgcagtggtgcaatcttggctcactgcaacttccgccttccagtttcaagcgattctcctgcctcagccttctgagtagctgggattacaggctcctgccaccatgcccagctatttttttttgtatttttagtagagatggggtttcactatgttggccaggttggtctctaactcctgacctcgtgatccgcctgccttcggcctcccaaagtgctgggattacagatgtgagccaccgtgcccggcccagagtagctttcgccttttatttttaaaacataaattctttggtattatatttactactaataatatattaacactttgtgggccaggtattgtgctaagaacttttcattgatcatctcatttattcatgagaaaatatgaaataaggaaaagtatcctcatttcacaaataagaaaacagaggttcagagagattaaataatgtcctttgggatttgaaaccaggtttggcaaagcctaggctcttaaccaccttactctctatcccttcttgtgatactgtcattactttgcattcttatgaagttttgtagtttcaaagaattttcatatgattatctccaaagcacaaacttatgataaagcactggcttggaagtcaagtgtatgtttgagtgtggtcctcctttacactgtgacctcaggtaaattattattattattatttgagatggagtcttgctctgttgcccaggctggagtgcagtggcatggtctcagctcactgcaacctccacctcccaggttcaagcaattcttgtgcctcagccttccaagtagctgagactgcaggtgtgtgtcaccacacccagctaattttttgtatttttagtagagacagggttttgccatgttggccaggctggtcttgaactcctgatctcaaatgatcctcctgcctcagcctcccaaagtgctgggattacaggtatgagccaccaggcccagcctcagataaattatttgacatcttttagcctcagtagtcttctaaaaccagagcattgaactagaattatttctcaggtcgctttcagatttgggggttgtttattactgcagcataacctcgatctaactgtttcagtatactccataaaacttatatttcagttttatatatcatcatacaaaatgaatctattttgtgataaataaaaatgatataagataaatataagataaatgacataagataaaaatgcagtctatgttagtggctatcaaacttcttgcttacaatgtacagtaggagattcattttgggctgggtgtggtggcttatgcctgtaatcccagcactttgagaggctgaggcgggtggatcacctgagatcaggagttcaagaccagcctggccaacatggtgaaaccctatctctactaaaaatacaaaaattagctgggcatggtggcgggcacctgtaatcctggctactcgggaagctgagacaggaggatcacttgaacctgggaggtggaggttgcagtgagccaagatcacaccactgcataccagcctgggcggcaagaacaaaactctctctttctctcaaaaaaaaaaaaaaaaaaggattcattttgtataatgacatatgtaactgaaatataagttttacacagcatactgaaacagatcaactaggttatgctgcagtaataaacaaccacaaatctcaggggcttaaaacaataaaaattttgttctggcttgtgttgtgtgcatcatgaggtggctgggaatcctgctccatttttttcttcatcccaggactctggatggagcagcctccatctcaaaggtcaccaacatcagcagtagagagaaagggagcacagcaaatctgtagtggctcttaaagcttcacctggagcgatacacatcacttctcctcacatgttattggctaagtcatttggccacacctaacttcaaggagtggggaaatgccatcccttcatgtgcctgggaaagaaactaaaaacaactgatgaacagcatgaatgactgccacaagcatgtacccttaccgtgtagatacattctgatgttttcttttctttttaattcaactaggtactagtctactctaccctaccctattctattctgttccttttattttattttttaaggcagtctcactctgttgcctaggctggagtgtggtggtgcaatctcggctcactgcaacctccacctcctgggttcaagaggttctcctgcctcagcctcccgagtagctgggactacaggtgtgtgccaccacacccagataatttttgtatttttagtagagacggggtttcaccatgttggtcaggctggtcttaatctcttgaccttgtaatctgtctgccttgcgctcccaaagtgctaggattacaggtgtgagccaccgtgcctggcctaaaacctttttttaaaaaaattatactgccttccagaaaatgctagtcagaaccctatatattgatttcaaaactctcctatgactgtgattgggtcacagtcataaacttcaaaatcactggcttatatccaagtggaagtgaaacagttaatagtaaactccaactttagccaattggagattattatgctggatttacacagaaaaatgtcataatgcccatgtttctgctcaaagggaaaacaaaacaaaatagaactctacacaagcctgtcctctcaacaaagggagataattctaatcacattcgctgatacaacagcagcaaatgattgctctggcagaaagaaggaaaccccaagtgactgagccgagtgggatgttcagggtacagccaggctgtaatatttagcaaacaaagaaaagctatttccagccgggctcggtggctcacgcctgtaatcccagcactttggaaggccgaggcaggcggatcacctgaggtcaggagttcgagaccagcctggtcaacgtggtgaaaccctgtctctgctaaaaatgcaaaaaaaataagctgggcatagtggtgtgtgcctgtaatcctagctactgaggaggctgaggcaagagaatcgcttgaaccttggaggaggaggttgcagtgagctgagattgcgtcactgcactgtagcctgggcaacagagaaggactctgtcaaaaaaaaaaaaaaaaaaaagagagagaaaataaaagctatttccaggaaaatgggtatatgagtagaattgcctctcctaaaaaagagatgttggagtcttaccctctgtacctccgaacataatgttatttggagatagggtctttacagaggtaatcaagttaaaatgaagtcatcagggtgggctctagtccaatgactaatgtcctcataacaaggacaaacttggatgcagagacagacatgcacagaggaaagacgatgtgcagaaacacggggagatcgaggccacctacaagccaaggagagagacctggaagagatccttccctcacagccctcagaaggagccaaccctgctaacaccttaatattggacttctagcctctagaactgtgagacagtgaatttctgttgtttagtccacccagcttttggtactttgtcatggcagccctaggaagctaatacaatgggggaacatggctccagcagtaagcagagcatactggaggtaagcaagacctcactggcaatatcataagagggtatataaaatttttctgcaaacagtgatgaaggcactggcataagaaagttatatgcaagcaaagaacactgtgagacacatataacagtttcaacaaaccctgggcaattcaaagaagacaatctgggcctggtgtagtggctcatccttgtaatcccagcactttgggaggttgaggtgggtggatcacttgaggtcaggagtttgagaccagcctggccaacatggtgaaaccccatctctattttaaaaaatacaaaaattagccaagtatggtggtacacgcctatgatcccagctacttgggaggctgaggcaggagaacttcttgaacccaggaggcagaggttgcagcgagccgagatcatgccactgcactccagactcttgggcgacagagcgagactgtctcaaaaaaagaaaaagaaaaaacttaaatgaaaaacaaagaagagaatctgtaccacagcagaaaaggccagtattcttactaacataaactaatgattttcagcatttcctggttaaggagagtaattggcattctttggtagaataccattgaatagtaactagaatttgagctacataattacggtatattaattgcacagtaaagtataaataattcgtattgtagagtgtattgttcagttcatctcaacaaattctattgttgtttcataaagccccaagttaaaaaaatactctctagcaattattgtaagtagattgatgtaacagatagaacttacctatttacaacagacatatttagacgcagagcaggaaataccacattttacatggccaacgtatgcgggtcatgctggttgcatcctgcacagctgtaggcaacaacattcacacaaactgtgaggaatgatgcttcctggaatcatgccctacagtggtcttacgcagataagtaatctctctcataggccttgtagggcttttatcaatttatttatttttaaatttttttcctgactataccgggtaacaaaagctcttaccacaagatgatggattcaaaattattagttggctctatttccatgtgaaggaaatgagactttgtgaaactgtcatggagaataccaccaaagtgtcacagctgatagcttagatatgttaacttagatacattaagataacttagatacaataacgaagacacattactggaacttagaacagtgttcttctacctgcgtccctacctcactccttctggttgcagagcaaaaaaacaaaaacaaaaaaaagcaaaacccaacaatctttgagacaatgcaataattaaacagggaatatacagttgaatgtaggtttataaagatagaaggaatgttaaaattctcagcaaatttaacaattcagttccagagaacttgccatgacctatgatacatgaatacaagaattaaaaatggtgtcaccaagagctttggctctatatgaaaaatattgaagcaaaaaaaaaaaaggagatctaaaatctggaagcttctcccatccagcctgcagcttggggttgtctttgtgccgacagctgcccagtaagtcagaagatacctgaaggcttggatctccctgttgccatgttgtttactcaggaaaagccccagccaagagtcacatcttttaagaactgtgaaaaaaagcaagtaatctgtcttacctatttaatggtgagaaacactgaaaagattgataggaatgcccctcttctgctgaatccaactctgcaaactggttggagagctgaaagggaagtgtgaagaagagaaagagggaaggaagggcagatttgggaactggtggatcgctgttgtatgtggattctgtgtatgaacaatagtccttctgcaatgagaagactggttacaagaatcccagtggtcctgaaattttttttgttgctattttctgtttttttttttttttttttttaagaggtggtaaactcaaatgccatgttggcatgtgggtatggaaatgtgtgcagaggcaggggataaggcgatggtgagtagagggactgtggttagctgcagacagcgtgctcctcctaaagcattcaaattcacaacagtgttttttgttaaaacaaaatagaaccaaaccactgccctaatgaaacaaacacttctgcaggcccgatgatccccttaactcacacctttgtaatcccagatcgaaaggatcagaagctggcagaagctgtgcctctgcatcttctaaaagtcacaattcgtccatagagtactgctttttgttttgtttgtttgtttgtttgaggcagagtttcgcccttgtcgcccaggctggagtgcaatggcacgatcttggctcactgcaacctctgcctcccaggtttaagcaattctcctgcctcagcctcccgagtagctgggatcacaggcatgcaccaccacacccagcaaatttttgtatttttagtagagaggaggtttcaccatgttggccagcctagtcttgaactcctgacttcagatgatccacccacctcagcctcccaaagtgctgggattacaggcatcagccaccacaactggcctgtttttttgttttgttttgttttgttttgttttgttttgagacaaattctcactctgccacccagtctggagtgcagtggtgtgattgcagttcgctgcaacctctacctcccgagctcaagggattcttctacctcaccctcccaaatagctgggactataggtgtgcgccaccacacccgcctaatttttgtagttttagtagagatgagttttgccatgttggccaggctgatctggaactcctggcctcaagtgatctgcttgccttggcctcccaaagtgttgggattataggtgtgagccacagtgcctggcctgaatgctgttttactaataatttgccaccttatttgtaagtacagtcttgattagataatttaccaaagaacattgataattcttcctagaaataaaggtagagggaatcatattatttacatacaggcttggctatttagtaggctagggtttagaatctgtgcccatacattttaatgaagtataattttgtgttgattacttctatctagataggaagatatgttgctttctagagtttatgtaagctttgtctctttaaggaggctaataccattaagctaataataataacgggtaacatttattgaccttcctatgtgtcagacaccatatactttacatggaatatcttgttgtgtctcatttaattcttgcaacaaccctctaaggcaggtagtgttgctatcctcattatacagatgagaatgccaaggcacagataggttaaggaactttcctaaagtcaccctgtaagtggcagagatggagtttgaattcaggaggtgtggccgagttagcagtcataaatctaactaactaagtaactaactaactaacaaacaaacatcaaaatctcttgtccactcacgggactcctttaccaagtctcttgaattcttgcctaggccagtggagagagttatcccagagcctcagacctgcaggcacaccgactcccactgccttgcagaaagaggttcaggagcagtgtttttggtagtcgcttgaactatttcttctgggaacatcattatctctgttgtgattcctcagagcagtagtcaaggtctcagagtaaaggcctccctgcatacttgtggccacttatctcactgggcatgcgagacaatgtccaagttacgcaagacaggctgacgagcatcctattagcacgaaaacatgatgcaccctgggtggatgagtttggactcatagctggtccccaggcctaaacttcccagaagagtgggagaatcagtggcttccttttgaattcccaggcagtgtgcccggtcacaaggcattccccaggaagggtgaagctgtcttgggacgcagaagtttggaacaccatctgggaattaacaaagagataagattttcagttcaatggcattcaagttgatttatgcttcagtaccagggacttgatatcaagtccctagagaaatagggacataccgggactattagtgaatcaaacagaaaagaagaagtaggctaataagcatccttaggaaagggagggaggaaggctgtcctgctttcaacttaataaggagtttgtcctaagtaggaggacatttctctatgttcagcttttagcaaggctgtggctgttgtaatctgcaatctgttttctctctgcctggctagggcctgggctcctctttggctgtctcagtctcactttggctctttctggccctacagctaccctggttccaccatgtcttcctcctggccctctggctctgccacccacattcgggttctgccttggggcagccctatcctttgccgcagcgggcatgtaggacaccttcagggtctccacactgctgccttccaaggtctcttggagcctcaggatctcgtggaccctctacagaaaattgtctggggaagctcagagtcatttactttctctactaaccacgaaggacagccaggtttactttgaggtggccattgcctagttgggcagctaaggagtggccatcacttctagagtcctgagtatgaaggagggtagaaatctctcttcccattggctttcttcagccttcaggctctatttccaagaagaaaacccaaaacaaacacaccgaccacttcatcctcctcctttctttctgtataccttcttcccacagtcccttcagttagaagaggcaagatttttgcctactctctgacattgtagccacctttaagcatagagcagcaagtcccagggcctgactgtcatgggcagaaaaggaagcttccctacattacgaaaaactgcaaattcatccaccagccctgaccttgatttaaagatgggctctacaaagtgctatagcaaatccttgttttctctcctcagaaagtctgatttcattgtctttctaaagagggcaggtaggtaagagaatgcaataaaacatgattcaagggagaaatgaaaatgcacagttttaacatttgcaaaatacatttttaaaactgtctcaacctaaccatttccttaaggcctccttgatgttgaagattcgtgcataattacattgagagcataggtctgttctggaagttgattcatgttttactccaattgaactattcatctttagtgacaaagtgtcagtcacctatgccctaattggtgtccacagaaaatagaaaccttatccatgggtcttttggtgagaagtcagtcattttcagcatgtagcagggatctttaatccaggaagaccatatgagacaacatggggtggaaaaatactcagagaggccaggcgtggtggcccacgcctataatcccagcactttgggaggctgaggaaggcgggtcacctgaggtcaggagttcaagatcagcctggccaacatggtgaaaccccgtttctactaaaaatacaaaaattagctggacatggtggtgtgcgcctgtaatcccagctatttgggaggccgaggctggagaattgcttgaaccagggaggcagaggttgcagtgagccgagatcgcgccactgtactccagcctgggtgacagagtgagaccctgtcccccctccaaaaaagaaaaaaatactcaattgatagtaggaagcattagtgacggtccttgttttgccactcttgagctctgtgacttaaggttacttaggatgactcacttgataacttctttgtttatttgtatatagctttaccccaaaaagctgagtcagcatttatttgtaatgttatgaaatgctgcccccttgtgtttttgcagggttcatttaatttctgttttgattttaaaataaatttttaatttaaaacttattgacctgttaaaaattttctttgtttctatcatttcttttttggctcactcatcttcctaactgccaaaatcaaacgagtagctactactacacctcattaagttaaaagctctcttacaatatccttggagaaatgtaaatatcattttaacaatagagaaaggcaatacttgctgtttcttattcctaagagaatcattcctggacttggaacatggacttgctggccccgctcagctcctattggactaaatattcctgacttttcgtttaaggaagagcaaagtcttcttctaaatgccaacctcattcccttagagtggtcattctttcatctggaatactgcagccactcagacaaactaccctgtaatagcccagatgtcacttggggatatcttgtcccttggagaattgtggagaacatggcccaggcacaaattttagtgcctaggatctgaaagactttaaaatgatttctattgcttggcttcctgagccacaataagtgtgacgttccatcccttcttttcttcttaaaaaaaaaaaaaaagaccaaaatatttaaaaaatactgcccccccccttcttttttttgtcagggtctcgctctgtcacccaggctggagtgcagtggcagggtctcagctcactacagcatctgcctcctgggttcaagtgattttcctgcctcagcctcccaagtagctgggattacaggcatggacaaccatgcgtggctactttttgtatttttagtggagatggggtttcaccatgctggtctgaaactcctgacctcaagttatccaccagcctgataaatatgtattttatttatttatttatttatttttgagacagggttttgctcttgttgcccaggctggagtgcaatggtgcaatttcggcttactgcaacctctgcctcctgggttcaagtgagtctcccgcctcagcctcccgaagtagctgggattacaggcacctaccaccatgaccagctaattagttttttgtatttttagttgagatggggtttcaccatgttggccaggctggtcttgaactcctgacctcaggtgatccacctgcctcgatctcccaaaatgttgggattacaggcgtgagccaccgtgcctggcctaaatatgtattttaatatttatatatatatatattttttttttttttgtgatggagtttcactcttgttgcccaggctggagtgcaatggcgcgatctcggctcaccacatgcaacctctgcctctcgagttcaagagattctcctgcctcagcctcccgagtagctgggattacaggcatgagccactatgcctggctaattttacatttttagtagaaatggggtttctccatgttggtcaggctggtctcgaactcctgacctcaggtgatctgcccgcctcggcctcccaaagtgctgggattacaggcatgagccaccgcgcccggccttacataaaaatattttgatgcaataaattttaatgtaaaatttgcacattttgcggcatacaaattatacctcaatcatttattccagtttttaaatttgtttattctcaatggcagggttggccccaaataaccttcctcttaggcaaacaccttatataaccatagtacaattaccaaagccaggaaattaaaattggcactatactaactaaatgtagactctatttcaatttcattagtgtttcaactattgtccttttttagttccaggatcctatccagaactccatatgacatttagttgttatttctccttagtctccttcagtctgtagcagttccaattgggagcagaagtttccacatcttctactttaggcacacaaattcaaccacacctggaatttcatgatgtttagcagcgtcttgggagatgggaccctagatttcattatctctttaggttctctcttcaagctccactttgtccccacataataatccactgtcaccaaggaaatgtagccccgtccccaggtctcattgcttctctcatggagtaactgtgccaggttaggctgactccactgtaggagctcagaaaatgacaccccaaaatacaatgctttggcttgttgagtacttagaactaaaggagattggaaggcctcagaagtagcctcagaagcaaagtctctctctccaacattctcctgccctgaggtctcctctcctttttccttgatggcaagccatagaaattataattcgaggccaggcacagtggctcatgcctgtaatcccagcattttgggaggccaaggcaggcagatcatctaaggtcaggagttcgagaccagcctgaccaacatggctaaaccctgtctctactaaaaatacaaaaattagccgggcatggtggcacacacctgtaatcccagctactcaggaggctgaggcagaagaattgcttgaacccaggaggcagaggttgcagtgagccaagattgtgccattgcactccagcctgggtgagaagagcgagactccatctcaaaaaagaaaaaaagggagagagaaattagaattcttcttccccagggcaggttatagaaaccagctatattactctaaccttcccctgccttctgtgtaggagctggccttaagaaattctctgacctacctttctgatagtaggtcataagaccctccttctagagggcttctgtcctataccaggaggaagaagtgctgcatagagaggccaaaaagaatctgaacagacaggccttgctgggttaactctctctcccccagtctattaccattagatcatacccatttttccaatcacatttccacatggccgtctacactttactaaatctaaggataaaaatgaaccattttctctgggtctttgggtcttcatttctgagggctcccatgtcatggatgactttgattaaataaatttgttatgcttttctcttgttaacctgtcctttgttatggcgtgtcagctttgatccttatgatgggtgaggaaacatatcacatatttcctgcttcctggaatattagtcaatgacattttctccatctcataagcttagaaattcaagagacatctttactgtctcttcagggctggctacatggtggccctggtgtactgccagctgcaccactgcttaccttagtcaattcctttgacatatggcaggatgcggtgagtttggaatggtttaagcattattactgtagccagaaactgtccagttgtttatggccaggttaaataagataatgggaaggatatacagatgtgtgtgtgtgtgtgtgtgtgtgtgtgtgtgtgtgtgtgtgtgagagagtgtgtgtgtgtgtgtttgtatgtgtgacagagaaagagaaagaatggtaagtatgatgcagagaggagggtaagataggaaaggcagcagcttggacataaaaggagtccatgctgaacatctgctatgtaccaggcacttcaagacactctctcatttaaccctcatagcaactccactttagttttgtttttgcttttgttttgagtgtctcactctgtagccgaagctggagtgcagtagtacgatcttggctcactgcaacttctgcctcccgggcttaagagattctcgtgcctcagcctcctgagtagctgggactacaggtgcatgccactacacccggctaagtttttgtattttagcagagaccgggtttcaccatgttccctagggtgatctcaaactcctgagctcaggcgatccgcccgccttggcctcccaaagtgctgggattacaggcgtgacccaccgtgcccggccttcactttagtattttattatccattttggaaatgagtaatctgagagaaactagatagtttagggtcagacagctcatgagtgtcagaatttgagattgaagacatgtgtgtgcagactccccattgtgtgtgtgcttctgcacttctgcacttccgtgaacataatgagaataacaatgtaagaataagaagaggtagctgatctttctatgaacagttactatgtgtcatccaatttataaacattctcttaactagtcttcctaacaatcctgtaaattaaggactaccattacggctatttaagagaccctgaaactagtgctcaaaggcttttgtaattctcccaagcttacacagttattaagtggtggcgcagaaattcaaattaggttatgtgatacccaacactacgtgctttattctcactctttagggtagtgccccggcctggagaggccacagtgcaggtgtcaggagggtgccattagaagggccgtgtctgtgcgtggaacacatggccacccatgcctgcgccacagtgggcaatggaaactcaattccaacccttccattaaagctcttatctagttacccctgtctctcgtaggataggttgttttactgcaggaaaataatctcagtggcttaaaacatcagaagtttatttctttttaacacacattcaaatcaaccatcagctgggaagcgctgttctgagtcgccccttctcaggctgatggaccaaccgctagatggagcaacactggtcatcgcaacaaaaagaaaaccctagaaactggactgtgctttacacagcttgtagccacctgcagttacttagatttgattcaaaagtaattaaaatcaaagaaaatggaaatttcagtcccttctttgcacaagctgcatttcaagtgcctgataattttttccacttgtggctactggctactatattttgtagtgtggattatggaacattcccatcatcacgttggtcttgacctatctggtctctcacactgtcctgactcagaaataacacatgtttacttccactcagaattcactggccaaaattgagggattgagaggctgacatttttgaaagactgtcctaaaactgaagataacagaagttaaagaaaacataaacataaaaacattctttttaaaaattatttttctgacctagtggtataacttgtttctttcctctactctctcttttgctagtgaaatcctacagggctggcagaaatttatagatgcgttgcccctaagaaacctttacatgattcaaactgtcatacttgctcttgtcattgtgcatgtagagctagactgactgagttttgaatcctaattcctaacatgaagtagctttaaattaaggttttgctcaagcaacttaacctttctgaaccccagtttttttttttagtaaaatgaatctaataaaaatatttctcacatatttactttaaccttatatataaaattagaatacctggctgtatcaggcagccagtaactaactgttagctactattgctgttatcacaaagaaatttatttccttgtccattcattccaagtcaaagagttctatctctgctgggccaaataaggccattttactatgtcttaatgatacatcattttacacctattcattatgtatgtatatatatttgattacatatataattgatttttaataatatgtagcattccactgtgagaccgagatacatttatttaatttcatttcatatttatttcattataattggcaattattaagaagcccgacaaaaccgacctttagaaagatgttatcatcaaaatctcttacatctcttataaattgctggaggaagaataaattggcacaatcacactggaaaggagtttggcagtatctcatgaggttgaatattcctaacccctatgaaccagcattcccattcctgtactggcatcactattcacaagaaaaaaaaaggacaacaatctgaaacccattgcttagataatgagaacatagatgcaattcagtcccacaaataatgctatgtatcattgaaaatcaattataactacatgtattgataggaataaatccttcaatattgaattaaaaaatgagttcaaaataactaaaactaaaaatacagcatgtatatgtatctacttatgtatatgtgtatgtatatttatgtacatatccatgagtgtagatatatatttgtaatttattatcagtattctagttctcagcttggtgataagttcacaggtatcattttatcatattacatcatagtaagaaaaagtgaggccgggcgtggtggctcacacctgtaatcccaacattttgggaggctgaggcaggtggatcactttaggtcaggagttcgagaccaacctggcctacatggtgaaaccccatctctactaaaaatacaaaattagccaggtgttgtgacacacacctgtaatcgcagctactctgaagaaggtgggagaatcacttgaaccccggacgaggaggttgcagtgagccaagaccacaccactgcactccagcctgggtgacagagcgagactccccctcaaaaaaaaaaaaaaaaaagaaaagaaaaaagtgaacatgtacggaacaatgatagtagtgtgtcatgaactaagggttgagacgagtccagtgagagcacttgaggtgcactgagccccagacctttcacgctttcttactactatcctcagtcacctctaattttctctctcctagtggtacctcacctcggccaggttggtcttccattttgagactgggatgaaacaccacaaaacagggcaggtgatatggtttggatgttttgtcccctccaaatgtcatgttgaaatgtgacatccaatgttggaggggagcctggtgagaggtgtttgggtcatgggggcgggttcctcatgaatgtcttggtgtggtcctcgcaataatgaggtgagttctcactccatgagttcatgtgagatctgattgtttaagagagcctggcagctcctccctctctcttgctctctctcttgccatgtgacactctggttcccctttcaccttccaccatgattgtaagcttcctgagaccctcaccagaagcagatgctagcaccatgctgcctgtacagcctgcagaaccataagccaaaataaatgttttttcctttataaattgcctggtctcagctattcctttatagtaacacaaacggactaatccagcagggctctgacttcctcagcaactgccaaggggttagacacaacacagaagtacagaggagttagcttcttacagagtgaaacataaccaatgggaaaaaaaagagagagatagagtagtagagtgagtagatttcctcaccattctctcttccgtaggctactccgagatgcagttcctcctggcaacccttctagagaggttctttgtgcaaggcaaacttgctttggctctttgcaatgtgtcatgaaatacataacagcagagagcatggaacacatccccttgtgttgcttttcatctttctttgccttttgggttctcactttcccaaaaccgttttaggatcttaattcttgtttcaggctctgttttctagaggacttagtttaacacaagggattcattaatagtaataataataacagtcatgtctcaaaatgaacttgtgttgtgcctggtgctgaaccacgccctttctctggattatttcctataaagctcccaattaccctaggagattgtatgatctttcaggtgaggaaacagtcactcggagatgtcttccttaagatcacacaatcactgcaatgctttatctttagaaacatgcacattattcaaggaagaatggacaatttctggatacttgtaaaaactagaaatatgctatttttcagactcactttatatagcattccttagagaactagcttctcccctgcttcacaaatattatgactcagaaatgcaatggctgtaatagccacgataaagattctacacaagcagttaaagacagaatatttaatgacagaaggttgagaaggctttgtctgaataagaaacttactaataatgtggacaaacacagaacaacctctcttgcctatttgtagtgataataatagtattggaaaatattggccaaaatataattttatgtaaaaaataaatccatgaaaatttaaaagctaatatcaggaaaacatcacctaaagcaacttatataaataatgtaggcaggtttggatctattaatgggttgtgaaatatatttcacaggttgaaactagcctactctgaaaccagagtgggttaaaaccagcatgataaaaagtagaaataggacagaatagtaatgatccatctgcatttaggaaaggtgtatattgttttgggaagattttctttgtaaatgtgttttagagtacatgtgactgtatgctaggttatgatgtaaatctctttattgtagtagaaaagagttttaaaaacactgatatagttggtgacaatatcacaaggtttataaaacaaaaacaaaacatattttcagagtcactgacatctaggttgaaatacctacccaaccataatgttttctttctttctttctctttttttttttttttttttttgagatggagtttcacactgtcgcccaggcaggagtgcagttgccctatcttggctcactgccacctccgcctcctgggtttaagcaattctcctgcctcagcctcctgagtagctgggattacaggtgtgccaccacacccggctaatttttgtatttttagtagagatggggtttcaccatgttagccaggctggtctggaactcctggcctcaagttatccgcctgccttggcctcccaaagtgctgggattacaggcctcagccatggcgcccggccccacattttcttgtcttaaggaagcccatgtctcttaatgctcagaaaacatcatggaaatgcatctcttggaggctgtgctccaatcatgcttttacccgtgatggactggaccccactgaccttcccgcctgattctcacatatcgtccattatggcggttttctcattctctcgacacctgggggaaatcttaaggttgttgagggctcagagctaacacttgactcagagtctgacacatttttggtacagaaaatgtttatttctttccaaatagttcacacctgagacctgactaagtacccaagcttcaggaagattcttgggatagagaagacaaagaggagatctaggcatggtgaaatggaaaacaattaaactcagaaggaatttgaattcgtttttggcaaggaccctccactttttcctaggcttgctgcctaaacatcaattcagtctgcctcttgcaggtgtctgtgtgatgcagagggagtcatttcatggcagaagtgtgggctggagaagacctggctaaatttcagaatagatgggctgaggatggggagggaactttacttcccctcagtgtttccccatctctctcctttgcaactagctgcttcctctctggaattttaacttctattcttggaggagagaacatttttaaaagctagcaaactcagtaaagactccaacacaatttttttaaaataaaaattacctccaaaaatgatcaaagcaaggtacaataattgtagacaacattagcaataaagagaaacaaaaaagaataaaatttatattactatcacctcatcacccagaggaaattatgatttattactccttggtctatattcttccagaccttcttaacacatataacacatactttgtccattttgttttgctgttgtgattatccttgtctcttaaatttcaaaaataaccatggtcattccttaggataattctagaagtaaatatcataactatattttctgagtcaaatagcacacatattttgaaggtcttctcttcagtttccatacacattcccagtctctcctctcctctccaaccttcataggcagcctggagatgtgacaagactcacagcactgctgttctggtttactctgtaatatctccatttgctgaagaattgtttgataaaagaccatgtctggttattctcccaaatgcaaatatttttatccatctgctatctgattaaaatgagttcatgggataatcttgataaatcttagatataaatattatgaacggaagtttattggtatgagtgtttacaagtataagcacaaccaggaatcatagaggaattagcttttcctgtgattaaacatgactaatggcaagagagtcagggggaagttgtcttctaagaagtatcattaaaagggcaacattggagcaagacaaagttacaaagtaggaaaagcaatcttttaggccatattaagaatgtttgactttatcctaacagtaacaagaaactattgaaggagattaagtagagggtaacctgtttggattgacattttgagaagtttactttcacttcaatatagaaaatggactggtagaggccgggtgtggtggctcacacctatcatcccagcactttgggaggccgaggcgggcggattgcctgagatcgggagttcaagaccattctgcccaacatggtgaaaccctgtctctgctaaaaatacaaaaaaattagccgggtgtgatggcgtgcgcctgtaatcccagctactcaggagtctgcgacaggggaattgcttgaaccagggaggtgaaggttgcagtgagctgaaatcgtgctactgcactccagcctgggtgacagagtgagactccgtctcagaaaaaaaaaaaaaaaaaaagaaaagaaaaagaaaaagaaaatagattggcagagtaagcaagagaggatgtgggaaggtcttggtgattaacaggactatggaattcaacaaagactgaggcattgaggatgattcctaaatacacaatagtgctaccttttctatgagagtaggaaaaaataacaataggtgataggtgcatgtgtgtgcgtgtgcatgagtgtgtgtgtgtttctgcatacttatatttttctttttgcaaaaaaacccgaaatagcaacaaaaaaccctcacaaacactaagaataaccagaaactaggaaattgcttacccatagagaagaattgtaagagtaataggggagggtgtgacttctcacatataccttttatcatagtttctcaactttatttttttctggctgggcgtggtggctcacacctgtaatcccagcactttgggaggccaaagcgagtagatcacttgaggtcaggagttccagaccagcctggctaacatggtgaaaccccatctctactaaaaatacaaaaattagcagggcgtggtggcatacgcctgtaatcccagctacttggggggctgaggcaggagaattgcttgaacctgggaggtggaggttgcagtgagccgagatcacgccactgcactcccgcctgggcaacagagtgagacttcatctcaaaataaataaataaataaataaataaataaataaataaataaatttaaagaacccccccaccccctttctttttctttccaacttttattttacgttcaaggcgtacatgtgcaggtttgttacatgggcaaaatttcacaggagtttggtatgcagattattttatcattcaggtaataagtgaagtacccaataggtagtttttcaatcctcaccctcctcctactctccaccttcaagtaggccccagtgactattgttcccttcttcgtgtccatgtgtattcaatgtttagttcccacttataagtgagaacatgcatttgcttttctgttcctgcattaattttcttaggataatggcctccagctccaaccatgttgctgcaaatgacaggattttgttcttttttttgtggctgtgtagcattccatggtatatatgcaccgcattttctttctctgatccactgttgatgggcatttagattgattccatgtctttgctattgtgaatagtactgtgattaacatatgtgtgcatgtgtctttaaggcagatatttattttatttttgtttgggtatatacccagtaatgggattgctggtcaaattgtagttctgttttaagttctttgaggtatctccaaactgctttccccagtggctgaactaattttcattcccatcaacagtgtataagcattcccttttctctgcaaccctgccaacctctgttattttttgactttttaatgatatccattgtgactggtatgagatagtatttcattgtgattttgatttgcattgattaatgatgttgaacattttttcatttgcttgttggttgcttatatgtcttcttttgagaagtgtctattcatgtcctttgttcatttttaaatgaggttgttttttgcttgttaatttgtttaaattccttatagattctggatattagacctcttggatgcagagtttgcaaatagttttcccatcctgcaggttgtctgttactctgttgatagtttctttcactgtgcagaagttctttaattaggtcccatttgtcaattttagttgtggttacaattgcttttggagtctttgtcatgaaatctttgtcaggtcctatgtgcagaatggtatctcctaggttttcttctagggtttttatagttttaggttttatacttaagtctttaatccatcttgagttgtttttcatatatggtgaaaggtatgggtccagtttcaatcttcgcatatggccagccagctatcccagcactatttattgaatagggagttctttccccattgcttgtttttgttgactttgttgaagatcagatagctgtaggtatgagactttatttctgggttctctaacctgttccattggtcagcgtttctgtttttctaccagtaccatgctgttttggttgctgtagcattgtagtatagtcggaagtcaggtagtgtgatgcctccagctttgtttttttagcttaggatttattggctattcagactcttttttggttccatatgaattttagaatagctttttcaaattctgtgaaaaatattggtagtttgataggaatagcattgaatctatacattactttgggcagtatgaccatttagacaatactgattcttcctatccatgagcatggaatgtttttccattcatttgtgtcatctctgatttctttcagcaatgttttgtaactgttgttgtagagatctttcacctccctggttagttgtattcctaggtattttattttatttggctattgggactgggattgtgctcttggcttgggtcttagcttggatgttggtggtgtatagaaaggttactaatttttgtacattgattttgtatcctgaaactttgctgaagttgtttatcagatctaggagcttttgggtagagactatggggttttctgggtataaaatattatctgtgaagagaggtagtttgactacctcttcctgtttggatgccttttatttgtttcttttgcttgactgccctggctaggacttctagtactatgtttaataggagtggtaagagtaggcatcattgtcttgttccagttttcaggggaaattcttccagcttttgcccattcagtttgatgttggctgtggatttgtcataaatgtcttttattattttgagatgtgtttcttcaatgcctagttgttgaaggtttttaacatgaagtgatgttgaattttattgaaagccttttctgtgtctactgtgataatcatgtgttttttgttttaacttctgtttatgtaatgaattacatttattgatttgcatatgttgaagtaaccttgcacccaagagataaagcctacttgattgaggtggactagctttttgatgtgctagtgaattcaatttgctaggattttgttcctgatttgtgtatctatattcatcagggataatggccagaaattttcttttcttgtgtctctgccaggttttggtatcaggatgatactggcctcacataatgagttaaggaggagtccttcctccttaatttttttggaatattttcagtaggattggtaccagctcttctttatgtgtctagtagaatttggctgtatccatctggactagggcttttactggttggtaggcttcttcttactgaatcaattttggaactcattattggtctgttcagggtttaaatttcttcctggttcaatcttgagaagtcgtgtgtttccaggaatttttccatttcttccagattttctagtccatgtgcacagaggtgtttataatagtctttgagggttttttgtatttctgttgtatcagtggtaataaccctttgtcatttatgatggtgtttggatcttcattcttttttatttgttagtctcactagaagtcgatcacttttatctactctttcaaagaaccaatttttggtttcatttaccttttgtatgttttctttgcatctcaatttcattcagttcagctctgattttggtcatttcttgttttctgctagttttggggttggtttgcttttgttcctctagctcctctaggtgtgatgttaatttgttaatttgagatctttccaacgttttgatgtgagcatttagcactataaactttcctcttaacactgccttagctgtgttccagagattctggtatgatgtatctttgttttcatcagtttgaaaattttggaactcattattggtctgttcaaaatttcaatttctttctgattgaatctgggcaagttgtatgtttccagaaatttatccatttgttttagatttcttctagagtgtgcatgaaagcacatagttttgactgtcaaagaatttcttgatttctgctttgattttattgtttacccagaagttattcaggagcaggttaacttccatgtaattgcatggttttgagaggttttcttagtattgatttttatttttattgtgctgtggtctgaaagtgtggttggtatgattttggttttttggaatttgttcagaattgttttatgcagagtgtgtggtcaattttagggtatttgccatataagaatgagaagaatgtatattctgttgttgttgggtggaatgttctgtagatgttaagtttgggtcttgaatatctttttttgttacttttctgcctcagtgatgggtctaatactgtcagtggggtgttgaagtggcccactgttattgtgtggttaactaagtctctttgtaggactctaagaacttgccttgtgaactgggtgctcatgtgttaagtgcatacatatttaggaaagttaagtcttcttattgaactgaacactttatctttatatctttatctttatataatgtccttctttgtctttttgattattcttggtttgaaatctgttttgtctgaaattagaatagtaaccctgttcttttttgtgttccatttgcttggtagatttttctccaatcctttactttgagcctgtgggtgtcattgcatgtgagatgagtctcttgaagacagcatagagctgagtctttcttctttatccaacttgccactctttgcctttagtgagatgtctagcctgtttacattcaagattaatattgatatgtgtggatttgaacatgtcatcatgttgttagctggttgttatgcagacttgattgtgtagctgctttacagcgtcaaggatctatgtacttaagtgtgtttttgtggtgactggaaatggttttttatttccatgtttagtacttccttaaggatctcttgtaagacaggtctggtggtaacaatttcccttagcatttacttgtctaaaaaggattttatttctccttcacttatcaatttagtttggctggatattaaatttttggttggaatttatattctttaagactgctgaatataggcccctaatttcttccggcttgtagggtttctgctgaaaggtctgctgttaacctgatgggttccccttataggtggcctgccccttctctttggctgcctttaagatttttttctgatggccagagatgatgagcattttttcatgtgtctgttggctgcataaatgtcttcttttgagaagtgtctgttcatatccttcgcccacaaatgtaccctagaacttaaagtataataataataataataaaaagatttttttcttttacattgactttggagaatctgatgactgtgtatcttggggatgggtgtcttgtataggatctctgaatttcctaaatttgaatgtcaacctctctagtgagattggggacatttttgtggacaatatccttaaatatgttttctaagttgcttgctctctctccctctgtttcagggatgccaatgagttacaggtttggtctctttacataataccacatttctcagaggttttgttcattcttttaactttttttctctttatttttgtctttctgaatagattcaaagaactggtcttctagttctgagattctttccttagcttggtgcattttgttgttaatacttctgattgtattatgaaattcttgtagtaagtttttcagctctatcagattggtttggatagtttctttctttctttctctttctttctttctttctttctttctttctttctttctttctttctttctttctttctttccttccttccttccttccttccttccttctttctttttctctttctttctctttcttttcttttcttttcttttcttttcttttcttttcttttcttttcttttctttcttttttttgttgagatggagtctcactctgttgcccaagctggagtgcaatggtgtgatctcggctcactgcaacctctgcctcccagttcaagcaattctccttcctcagcctcccgagtagctgggattacagttgtgtgccaccacaccccactaatttttgtatttttagtagagataaggtttcaccatgttggccaggctggtcttgaactcctgacctcaagtgatcaacctgccttggcctcccaaagtgctgggattacatgcgtgagccaccgtgcctggccagtttggttatttcttaaaatgactatttcatctttcagctcttatataattttattggattccttagattccttggattgggttttgattttatcctgaatcttgatgatcttcattgctattcagtgtctgaattctatgtctgccactttagccatttcagcctggttaagaacctttgctggggagctagtatggtcatctggaggtaagaagatactctggctttctgagttgccatagttcttgtactggttctttcttatctctgtgggctgatgttcctttaatctttgaagttgctttcctttggatgggttttttttttttttttttgcttttatattctttgatgtccttcagagtttgactgtggtataagttgggtttagttgactggccttatttctggatgattttagggggccaaggctcagttcgacactcctaggctttgtgctctaaccttggggggctaagatctgccccacaggtttgctctcttgcccctcgaggttaagtgcctgctgcattggaggggctgaggagtgttcctgatttgctggcgaccacactccaatggggtgagggagcatgccagcaaaagtgcttcgttggggtggtggcagcaggatccgcacttgtgtgtgccagcagtggcagtgtgcatggcagcacatagttttgactatcataaactatctagtgttttgcataatcaaaacacaaaattaaagcaacatggatgggcatgaaacctaaattttaatacaaacagaaacaaacattaccatatttctattgaatacgtttcagggatgccaacgagccacaggtttgttctctttacataatcccataccctaaaggaaaatgagaataatccgaataacttctctatcccatcctctgattaaatatcactaatgtaaacagaaaataactactaagaaaccttgaagtgtatttagtgagtttattgttggtaatggtatgagtatggcaattctgaaactatcttgtgtgtgttgtatgattgagcaaaggaggaaatagattgatgttttggggagttatgtttctgactgtggagaaaggagagagaattatgttataagagaagccctgtagtagcgaactgcaaagagcctataggcaaccttgtcccaagagtgttcagagcttggtttctagatactctcccccagtgaaaggaaccactttggagaaataactgattccaggactgagaaaaggaaaatacaaggtaagcctgggacatcttgttccagaaagtaaaagaactgttcaaaaatggatgaggtcatgtcaaaaaggacacagagccagtctgaagtggttccactggccaaatatggaataagttgagaatcaaaataaattatgatagtaatgtattatagttcattgaataaaaattaaaaattcatggatctagaggtagatagataaatagatattaatagtatagccttccttactgtagaatgccaaacaatgaatatagaaggattccaaatatagtaaaaattgacttaggcaagaatcattactggatgctaaagttattaggtggtggaactttatgggaaacaagatattacacagtaaaaactgtggtattggcacacttgcaagtcagtgagaaataggagaacaattggctggaacaattggctattcattagggaccaggagcatggattccagagccaaagtgtctgggataaaatccttggctatattgcttacttcctttgtgaccttgggtaagctacttaacctctcaaaattctgttccctcatctgtaaaacagggataagcatgctatgtatttatgaaaatttaattttactatttgtataatgcagaaaggtgcccacacacataaaatactgtataagtattaagtaaatacatttggagaaataattataaaatttaatcaccgcatcatgctaaaattagtttcacattagattaaagacaaacaaaaaataattttagaaggcattatgggaaagtgtattttaattcttgtgcaagatacaaataatgtaaaccataaaggaaaatatcaataaattaaatcataccaaaattaagagttcaaaggcatctgaagcttaattagttcaaagcaaaattttttttttttttgagacagagttttgctcttgtttctcaggctggaatacaatggtgtgatctcagctcactgcacgctccacctcccaagttcaagcgattatcctgcctcagcctcccaagtagctgagattacaggaatgtgccaccaggtttggctaagtttgtatttttagtacagacagggtttcaccatgttggccaggctggtcttgaactcctgacctcaggtgatccaccagccttggcctcccaaagtgctgggattacaggtgtgagccaccactcccaacccaaaacaatatttttaattttcctgtcattctagactcgtttggcatttttgatctcagagaatgacaccttttcccattgaggcttttgtatcttgcttattttcttaaaaataaattgggccaggtgtggtagctcacgcctgtaatcttagcactttgggaggccaaggtgggtggatcacctgagatcaggagttcaagaccagcctggcctaacatgatgaaaccacatatctactaaaaatgaaaaaattagctgggcatggtggccagcgcttgtaatctcagctactcaagaggctgaagcaagagaatggcttgaacttgggaggcagaggttgcagtgagctgagatcgtgccactgcactccagcctgggtgacagagtgagactctgtctcaaaatcaatcagtcaatcaatcaatcgtggaaatcattttatatcagttcatataggttttccttattgtttttaaaaaaagatgcacagtattctattgcaaggatctatcattcatgcaatcaattttctatataggaatttttgagttgtttccagtattttggcaattacaaataatgtcttaataaataacattttatgtatttattttcgtattgttgaaagtaaacttcagggcaaattcccagaagtcgggttgctgggtcaaagcgtaaaatgtgtatcgagttttgttagatgttgccaaatttcaatccacggagactgcatcattttgcacacccatcaccaatatatgagtgctcattaccctacagagtatatcatcgtacatactaattttgatcacttggatagatgtgaaatgttttactctttttcatttggatttaattatgaatgagatagaagatctcttcataggtgtaaggacattttgtatctttttaggggtgtattgtctacatcatatattttgcccatttatctataaggttttggtccttctttaatcttgatgtttacaagttatttacatattaatgatattagttctttatctgcaatgtgtgttgaaaatattttctcccagttcatcatttgtctatgtttttgtttacagagttttgtgtcattcaaaagttctttaaaaattttaaaaatttttatagagttgagttcatgaatcttttcttttattgtctctagatttttagacatattttgaaagtctttcatcaccagatttcaaaggtatttatctatgttttcttctaatacttgcatggcttcagttttataatgagttttctaatccattggggttttctttcttgtgtagactgtgaggatacaatattatcatctatatggcttttcaattgtcataacctaacatcatttactaaaagtctatcttggtcccagtaattagagatgtcaactttatcatgcattatatttccatatatacttgtgtcttctagtctattccactaagtaatctgtctattcatgaactagtacaataatcttgtaattataatggctttctgatatatttgagtatgacagagatttctgcctccacctgtccctcgatagctctttatttttttcagtgttttcccgactattcatgcatgtttatttttttcatataaattttagtattaaattatctcattttaagataatcaaatctttttggcatttttattggggctttattaaatctgaaaattaacttatggagtactgacatttttatgacattgagtcattctctacctatttgtttaagttcgcaagttaagtttttggaagtgttttaacatttcccttatgtagattttaaaattttcttaaggctatttctattgtaattgctattgtaaatgggattcactcttccattgtttgtgtatatatgatggatactctattgattgttgtatattcattttatatcttgctatctttctgatttgtaaatcatatgttttattattgattctctagatccattgaatttttatttttttaaatactaggtttttcttttctagaaactcttttttcttccaaatatataccgttattttaataatcttttattcttactcatattttcaattctctctcttctttaaatattttaaacataacttattgcatgcttattaatcgtcttacctaaggtctttgtatatatgagtctattgtctacttgttttatttctgctggctattgcttacagtgtcttacttccttatgtggttttgtgattttttaaaaaatcatgtatttgtatatcttggaacactatccgtggaattgttcaaggcctatgtttaaagtgagctcctctagaaaggactgaatttgcttttgctaggtgtttaggaccaatatcaacctggaaccaatttaaaataattcttagccatgagctgttgaaattcacacacatcatatgaattcaggctacaaacctggatgaaggctgtgttagggctgtacatctcagaaggaaatctctcctcacttatttagccaggtccaagattaaaaataaatgaatacatcatttactgtttgctctgagagcaggtttatttctggatctcactttcatggaaggtacaactgtttacgttaccagctttctgtaaggatctcctggaaaaattcctctttagggggacctagccttgagcttgagaggctgtcacagcaaaactcagtctccagggtttggcagatgccccaggacaaaagcatgcctgagtgtttgtgcacctttctggattcccaggagacttttattaatttttgacctttatggatttttaaaaactttctcactaggttaacaatacatttagaaagcgcctatttaaatatgttatatagctttttggttgtttcagtggagaagttgttaagagtgtgcaggctgtcctagtttcaccagacttggaaatctaaagtgatttctgaaacatcaaatacatttaatttaaaatgaattaaaattatcatatagatatctatttctatcatttttcttcccttcttttcacaggtgttgatagatatctatttttaaacatggaaagatggtggtgcaatggccagtgagtacaaaaagttaaaaaattgtaaaaagtatgagcccatccttagaaaacattcatagagatttttacatagagaggaaattgttttatacaaaagtgattattaacagtagctgcttgggaggttgaattgtgagtgattttttttcttttgtttccccttttgtaattttccataataaacatggattatttggccgaaaatataaaaacctatttaaaaatcatataaatctgaatgaaacatttcaatacgaagcaggaatagtgttagtctttttcaatactatttcagtatctttttaaattcatcagctttgacttaaagtcatattttatagataagctttttttttttttttttttttagcctgttggcaaaatcagtctggggtaggcttctgtcttctgtagagctatctgatttccagaaatgaaaggctcttcccaataatgaggctgtcaatggaaagggagcagagaatgtggttctctttcattggagccttccaaaacattgcaagtagtttgaggagttgaaatggcttagatgatgtcttgcctggaaacagaaaatagagatgatcttgcaaatgctttccagtggatgattctattattttgtatgagtgtcccctggctggaattagctcttattttttccactacctcattatagaaaacttaactaactccagatgaagaatttcacagcttcaactcttttagagttgatcttgttaacgggtctttctagaattgaccaggtaaaaaaatatacaaaatttagtgtggataccaagaaattatgaactctgaagacatcacaacagccccttttctgggcaaatttgcaagaaaatgccacaccaaaaagatcaactgtgtgtagaagtggttgctgttgtacaataaaaaagtttggaaaaacaaaaagaatactcttgagactccaggaaaattccacttgcatacatcatagaattattaaaacaggaaagacagtgtaaggtcatccaaatcaatttctttctttcagttagtcccccagacttggtgatgaccaacagtcattttcactgtgaagtttaattgtaccaatacgtacactatacttaatattttgaaagacagcttttttttctaaaacatgattcaggtttagtagaatcccacaccctcatcaacagaattgttttcttctccaagatgtagttgtgtttaggtgttcaataaaataactgaaagtcctttcagtgttacaaatgaatattaattggtccctagtagtaagtcaactatgctacatgtactcattccaaaaatcagacagatacatttatttcgatcgttgatttgaaatctcttagttgaaagtgcatttttgttctgtgtagtaaggaaagatttttaaatcgtgttcaattctatcatcacagacactcataaattatttcattatcacaagtgccgacagatcaaacttggcaggttcacttcacagaggtttggaatgagctgaaggttcatcatcatctatcctctagtttaaggctgagtccctgtgcagaatacctctaagcaaggaatatatctaaccctttatggtcctggatcttcctctggatttctgaatggaaatgttttgtgttgtttgagatattaagccaattaattatgctgcaagttggccctcatactggtgaggtagtgcctcctagggactggctacatcatcacaaatctcctttttcttatttaatttcttcatgcctccatttctttttctaaatggatgttactacatgctcttcctatatttataggtttgtgataaaaatcatgcgtgatagtttatttcaggaagctttgaaagtgaaatggctatctcataaaaattattcttattatcactcttagaggcaagattttcataagaaaaccttctgagaaagtcagatatggatgcttgagtgggcatcttaatttttattcttatttttgaggcctagtctcgctctgttgtccaggctggagtacagtggcatgatcttgtctcacggcaacctccacctcccggattcaagcaattcttctgcctcagcctccggagtagctgggactacaggtgcgcactaccacacctggctaattttttttttttttgagacctagtcttgctctgttgctcaggctggagtgcagtggcacgatcttggctcactgcaacctccggttcccggattcaagcgactctcctgcctcagcctcctgagtagctgggattgcaggcgccatgcccaagtaatttttgtatttttagtagaaacggggtttcaccatgttgatcaggctggtctcgaactcctgaccttgtgatctgcctgccttggcctcccaaagtgctgagattacaggcgtgaaccaccatgccagccttgagtgagcatcttgatagttaaatctgaccatatcattgtcctgttcagaaatccctcacttacacagaacaaaatccaaagtctgtctacgctatctggacccagctacaatacttatgacatctggaccctcttcccactctgatctcactcttactctttcctcttatgcccacagtcctccttgctgttctgacatccccagagactgcttttggggctccctgcatccttcctccagttaattccaagggtggctgcctgcttaaatgccctcgacccccctccatctaaaagggcagcttgtgtccattttcacccctgggtcttacccttctttccagcactaaccagtgacattatatcatatatttctctgttgtgtgttttctttttctttttcatttttttttttgacggagtctcgctctgtcacccaggctgaagtgcagtggcgcaatctcagctcactgcaagctccgcctcctgggttcacaccattctcctgcttcagcctcccgagtagctgggactacaggtgtccaccaccacgcccggctaattttttgtatttttggggtttcaccgtgttagccagggtggtctcgatttcctgacctcgtgatccgccctcctcggcctcccaaattgctgggattacaggcatgagccaccgcacccggcctctgttatgtgttttctgtcagtctcccccatgagtaagctccggatggaaggaacttttttgctgtgtatccctgatacctagaatttcacctggcaggtcaaaggggatggatgaacatggaagtaagtgaatggcccctgagtcttctgccagctgctctcttggttagacagcatgtggtgcacatgtggatttaggtagatgccttaaaactgatgacagccacatgggaaggattgaagaggcataactgattaattttgttcaattcaatgtagcaaacatttaccaagtccctattatgaataagatcctgtgttggagttgatattcgcacttctgcttctctaaaacaggcttataataggtggtttccatacagacgaaactaaagcagaaagacttcctctgtcagctaagaccatttcttctgatttctgctgaaataaaatgtcagttgacgagcctttttgaaacccctactataagcaaggcactgtgctgcttatgatctcaactgaaacacttcacaaggacgtcactctttcagctttaaataatggcaatctaatactcaggaaaaagaatttgtacagtaatacagcataggattatagacttttgcagactacattaacctgagtgcttctaaaggtacaaatgtcaaagctattagaattctgttaattctgataatgtacccacaccattcattgatgtgaacttttgatggagatgagaataaaagtgccattacaaattagtcagaaacatatatttttctcattattattattattattgtggacggagtcttgccgtgttgcccaggctggactgcagtggcacgatctcagctcactgcaacctcttgcctcccggtttcaagcgattctctcacctcggcctcctgagtggctaagattacaggtgtgtgctgccacacccagctaatttttgtatatttagtagagacagggtttcgccatgttggcctggctcctctcaaactcctgacctcaggtgatcagcccgcctcagcctcccagagtgctgggattacaggtgtgagccaccatgcccggcctttttctcattattagctgaacatttaggactcatttttgtgcaaatactcatatagtttatttctggtatatttacctatacaattcataagagcaaattttaaatgcacacatatattagggcctcattacccaaaaggcctgggataaaaatagtggaagatacagagtggtatctggcacagttaatattagttaacagtgaggacttactgtgtccctgacactcttctgaaggcttgaagggattaattaaattagatggattgattcatttgataattaccacatgcccatgagtaccatagtgggtactcttactattcccatttaaccatactaaaaaacaggcacaaagaggttaagcgtcttgtccaaggttagtagtggtaccagaattctgcacaagaatccatgcttttaatcactgcattatgaatgaacatgctccaaggaagcatgcattccacctgggcagataagaaagaaacaatctaaatatcagagttgagagcagagctctctaaaattaatatgtatattttttccaaaatacacaataatgactataagggatcaagggagccaaagataagttctccctgggatagtattgagcaggaacttgaaggaggggtgggttctgtttaggtagatgggaatagaaaagtgttcatatggtttaacatcagaaaaagggcagaattaggaaaattctatttgggtgtcagggaataatacaagagcaaacttttaggaagtgcttactaagtaataggtgaagagccttccagatattataaaattaaatctcctaaacacgataagaggtaactataactaccatgctacaatgtggataaagtaacatgtctggctctgacttcagaactcacatccttaatctacattataaagtttgtccaggaggttgagtggacataagataggaaagttaggctaaggcagacacggaggaacttgattactaagctaatatatttacaccttattctgtttaaaggagccaccactgggaggatcagagcaggtgaaggatgtaagtaaagtgggtttgctcctgcaggaatatacagactgttgatctcaaccttggctgtgtgctagaatcactgagaagattctgataaaatacccatgtctgcccctgctcctggtcagctaaataagacactctgggttgctcatttccctcatttacttaaaactttccattgccaagatatagtcaaaatacttaccttggcatacaaggttgtccaaggtctgatccttgttcacctcttgtgtctcacatcacccatctttatttatttatttatttatttatttatttatttatttagagacagggtcttgctctgtcacccaggctggactgtggtggcgtgatctgggctcactgcaacctgtgcctcccaggctcaagcgatcctcccatctcagcctccagagtacctaggactataggcacgtgtcatcatgcctggctaatttttaattattattattattattattattattattattttgtagagataaggtcttattcccaggctggttcccaactcctgggctcaagtgatcctcccaaagtcttgggattacaaaggctctgagccactccacctggtcttaagtctctcctctgatttcaccaaactctgctcattcaaaataatttgggcctatgcaagctctctcttgcccgatgactttgttttcttgttctttttttcaattgtttggttgaaaacccaaggacttaataaaagcttttctttcttttcagaatgcttttgtttcatatcttctcaaggctggctgtctctctttttgtcagcctaaaggtcacctcctcacctatgtacttcttgatcattctacctgaataagttgcataatacctgcactcttgcccctcagcccgctaccatcagagcacttcatgttttgtcagtgtgtgtttgtgtagctggactctagactccacaaggccaacggacttgttttgctcaccccatgcatactcagagcccagcagtaatatctgtggcataagttaatgagaaggcatatcttgaataacttagttaatgtcacccaactcatgagggcaaagcctggagacgaacacaagctcgaaaccatcatggtgctctgctggaatatggtggtttgctcattcattcttgcttttgttcattcattcagagaacatgttttggattgataatatatgctaagccaggtgctagggacacagataaaatggtcattgatcctgagaacataatctggacaactttaagtgaatacagtcacagagggagcagggcactgccaactgatttcagtgctcagcttggtttcctctaagcttctgtactgaggctattacagggtagagaaattctcagtctagtggcccatggtgaattttcagacaaatctgaaggttttggattgaaatagtaaaaagtttgagaacaaaagtttcatcaattaattaacacgtcaaagggcacagatcagaagagatactaacttgaaccacaacttacatgaataacagctgaaaacaaaacaaataacaaatttcgcagaacacttcaccacagcataatgaacagaattttccaaaacctagacccatatgagattttctatctcatgcgttctctgtctctctgctctctcaattctctaaaagaagagatctctgtggttttctctttatttctagctctgtgtgcttctcatttctctggaaaatctaaaatgtcctcagagaggactttctggccctcttcaatcttcccaaggctgattcttgaaatgctgccttaggatgtctttcctttggtttaaagttttgctcctattaatattttaaatttctttgtagtctcagtggatatatcttggtggttatatgttatccaaaatttttttctggggtgtaggttcttggaggaagtctcaccagaggcctgaggctagccttggtgaatctatggactatgctgtatatggaagcaacagcctgaatagcaggaaataatctgagacgtagctttaggctcgatgtacaatgcaatcaccacttctttcttttcctttagcaacatattggcttgaccaataggcaacaggtaacaggtaacaatgcttcatccttgtcatcagtttttactgttttttgggggtgtgtgttattattgtggcttcttcagaatagtcaagtaattttccttaaaagagaaaaaataggcaacatgaaattaagttgattaaaagaatgtgaatgggaaaatagatcagcatagtgttaaggatattagctttggtgacatttgaattctcacttccatttacagactccatagtaatcttggtaatctcctctctccaccctagttccctcttctgcaaataaagagtgtaatagtaccactttatagaccccctagagatgcttcttagctggtctactcttctggtaagggcatgagtctcatcaggggcgctcgaccctcatgacctcatgaccctcatggcctcattacttcccacaggcactacttccaaataccatcttattgggggtttgggcttcaacctatgaattttgggaggacagaaatattcagcccagagccatgggataaaaagagttggtgctaaaataagaaggattgggtggaagatgtttaagagggcaaatttctagtccctctccttaatgctacactcctgtatattggtacaaaacaggtttattgtttggagatggaaaaacgtggagttttgagcctgagagtgaacccatgcagtgaagagaacaggcgtgctactgacaatagaggattaagaggccatatgcataaggagtgctgattttgaagtcctcaagccaactcgttcaatcagaactctggcagccagactttgtccttgaggcaagggacaggaagtgcacactttgaggaagctgccagcccaagaggaaggaataaagacactgaccctggggcttcttaacaaagggctacagtgaaggtcaccctaaaaagcaggggcttatgttcagcttccaattcctttttcaatctcccactctgcgtttactctcctttctttttatatctcagatttttactttgaaaaattaaaatctcagggtgggcatggtggctcacacctgtaatcccaatacgttgggaagccaaggcaggtggatcacttgggaccaggagttcgagaacatcctggccagcgtggtgaaaccccgtctctactaaaaatacaaaaaggagctgagcatggtggtgagtgcctgtaattccagctactcaggaggctgaggcagaataatcgcttgaacccaagaggcagaggttgcagtgagccgagatcataccactgcattccagcctaggagacagagtgagactccatcttgaaaaaaaacaaaaacaaaaacaaaaaactacagaaaagttgaaagattagtacaaaggatacccatatagtctttacataaattcatcaactgttaacattttgtataccttctcttgctcttctctacacagactttttttttttggaaccacatgatactttctcatactcagaccaccaaagaatagcagaaatctaagtaaagttcctaatgtggagatggaattccaaacaaacaaacagacgaagtcttttggaaaatatagagtctatgcagagagaaaaaagcttaaaaaaacacaattgttaatatcttcagagaggttgtgcctatgaaacaaggataggatagtattataaaaacctttaaaaaacacaaaatggatttattggaaatcaaaatgtaatagcagaaattagaaactaaaatataaggccaggcacagtggctcatgcctataatcccagcactttgggaggccaatatgggtgaatttcttaaggccaggaaatcaagaaattaaaataaaatttaaaagtaaagtgacaacatccataaggtagaacaaaaagacagagagaaacagtaaagaaaaagtaataacattacattatcactctcagaggtctattatctgaaaaaggaaatccagacaaaaagaaaagaaaaatagaagggaggatttcattaataagatgcttgaggagatttttctagaaacaaagcatgtgaattgctagattgaaagaatctatagagtacctagtcaatggatgaaactggacccacatcaaagcataccatcatgaaatttcaaaacataggagacaaaaagattttataaccttgcaggaggagtaggttgttgcggagactgttcactcagagaggaccaaaagtcagaatggcttcttaattatagcaacaatgcaggaagcaagaaggaagggagcaacacctttaccattgtgaaggaatattatttctaagctagaattctgcgcccattaaacttgtaatgaaacgtgagggtaaaacataagacctgaaaaatgtgtctcccttcaccacgcacctatcttaggataccactggggaatatccttattcaacatgagggaatgacatagaactaggaagacatgtacaattgaaaacaggatatccagcacatgagagaaatagagagaacctgtggaatcagaattgcgcccaggtagagaggtcagtggcaacaggctgaatatttttggtccccaccccccaaagaaccatatgttgcagactaaatccccaatttgatggtaatggaggtgggacctttgggagctgattaggttctgagggtggagccctcatgaatgggattagtattcttctaagaggagatgcaagagagattctctctctctctctctctaccacgtgaggacgcatgaagacagccgtttgcaaaccaatatgtaggccctcaccagacactagagctgttagtgtcttcaccttagatttcccagcctttagaactgtgaaaagtgcatttgtgttgtttaagccacccagtctatggtattctgttacagcagcctgaactgactaggacagcagccattcaaattgaagcagcctggcgcaagagacagatagctaagagctgtcatcaccatgcctgctactgttgaaccagctttttaaccagatcaaactcctggaggatgtactcaaccagagcaaggggatgtactaggaaagagggagccatcgtatccaggaaatcagaatccagtcttggaaaaaggcaaaggaacttctaggaacagtagaaaagcaaaggccaggatgacaaccaagcagcagctctaagggggaaaactgtccaaagaaggaaaaatgtctaaaaaaatttacctgatgtaaattatggaaccctgtactgagatgctgttggaagtagtaggaagaactagcaaaaagcaaagagaaaagtaagaaactgaaaaagcaaggtagtttattaacttcaggaaaaactaaatgtagaaagaaaataatcactgatgcttccatatgaataatatttgcatatcatatgaatgaaaatgctgaatatggatttaaccaaaattgtaatctaatcacattgggatgatagaagaggagaaagggagatggcagcataagagagcctatcctttctgccataataggaaatatataaatgatgtttaaaattgattaatagggctgggcatgatggctcacacctgtaatctcagcactttgggaggccaaggcgggtggatcacctgaggtcaggagttcgagaccagcctggccaacatgatgaaaccccgtctctactaaaaatacaaaaattagccaagcatcgtggcgggcacctgtaatccgagctactcaggaggctgagtcaggagaatggctggaacctgggcagtggaggttgcagtaagccaagatcgcgccactgcactccagcctggatgacagagtgagactctctctctctctctctctctatatatatatatattatatattatatattatatatattatattatatattatattatatattatatattatatatattatattatatattatatattatatattatattatatattatatattatatattatattatatattatatattatattatatattatatattatatataatataatatatataatatatataatattttaaatataatatataatacattatatattatatattatataatgtattatatattatatttaatatattatatattatatattatatattatatattacatattatatattataatatatatattatataactgattaatagacacatggcagtacatgcgtgttacttagaagtatggaaattttgaaagtctcaaaaaaaactgctaagagagaaaaaaatacttctggaaagcaagacagtattatttctattttacaagttttcagtattatataactttaaaaattatatgtatgaattattttaataaaataattaaaaaattgaaatagtccatatcagttctcccagcacatctggaatccaaaagcctcttgatagaagttctttttcttattataatattgttattattggaaacagtcttggctttttgtcagatgatatttaatctagtaatatctgacactgactctttttggggacttaaatggggcatttaattcgttggatctcagtttcttcatttgtaaagtgaagggagtttggcacatacagtcatgcattgctcaacgacagggatacagtctgagaaatgcatcgtttgacaactttgctattgtgcgaacatcttaggatgtacttacacaaacctagatgggctagcctactgcacacctaggctacgtggtataacctattgctcttaggctacaaacccgtacagcacgttactgtactgaatactgcaggcaactgtaacacaaaggtaagtatttgtgtatctaaatatagaaaagatacagtaaaaacgtgacattataattcttatggaaccaccgccgtatatgcagttctctgtttaccgaaatgttgtcatgccactcatgactgaatgtataatctcttagacctgatccagcattattgtgctatgaatagaatcttttatgcagaatgcatatgctgataggacgctgtcacacatgaaaaacttggctgctgttagggtcatgactttgatctgggccatggagctgaaaagatgaggaatgcttcatcattggttcaagaacatgaaaggcaattgtgagaaagggagggctccagcaccctaaaggaaagaagaagacaatatgattttcacctctgaataagtcttaaccttgcagagctaatgtgttaaatagggtgatggacttgaaggcaattgcaaagcaaaaaccctgcaggagcgtgggaggtatcactacattgttcggaaagaagtcagcacactatagtggaaaaagctctggcctgggagtcaaaccatttgaattctagtgttcactttgctgttaatactctgggtaagtttggacaagctctctcatggcttttgtcccagcttcaggattggtggaataaaggttgatttggttgagtttcttccgttaatagggaaataaatcaaatctggagctaatggggttgttcatggactgagacaaaagattcaggaagaacaggagccagatgtcctggagctctgagcagggctggtattcaaaagattgagcaaccagggtggtacagggacaatccaatccgaatgaatgctggaagctacatttgagtgcaaactagaggcctgcagcaaatctccaggctacctcttcaattgtgggatcaaaagggagacctgaggtagaggtcccagggaggggcagggaagaggatgttcagggtgttggggtgttggagaagcagctatttaccaaccgatatggaaatatttcaattttttttttttgaggtggagttttgctctgctgcccaggctggagtgcagtggcatgatctcggctcactgcaacctctgcctcccgggttcaagcgattctcctgcctccagcctccctagtattggggattacaggtgtgcaccaccatgcctggctattttttaaaaaaatatttatagtagagatggggttttaccatattggccaggctggtcttgaactcctgaccttaaatgatccacccacctcagcctcccaaagtgctgggattacaggcatgagccaccatgcctggccacatttcaatattttaacaactggtataactgcaatggtatgctcctgctggaggtgagagcgctatctgggtattaggagatagtgttccctcagacatcattgttaggataaactgagataaaagttcaggaaacatttttttctgcccttgtgtcccaccacttagtactcagatttgagggacagagtatctctttggcttagtttagagtctatgcccactaactagggtaatagttaaaaaaaaaaaagggcaagctgaatgacaacccccctgcaactgcatacaatggattggaggtaatttcctaaaggaattcagacttctgctatggagggtgagaaacgaagtgcttaacagctggtacagcaaagacatcagtcagttagatgggggcatgggcgcttgactatgaggcagagtctggaagacactctgctgtgctggccatcaaccctctgttaccagctttgctattgtaagatcggggcaaataggggtgtcccagaagcaggaatggggtagtcagcatggatgggggatcatgggagaggaggtccgggacttgggccatggttattgctcatagatatggcatattattatcagctggagcctgcttactggctgagtatgagggtagaaaggacaccagactgggggaaaagaatcacagctgggtgttacagggaggttggagtagaactgcaaataatttgttcagctgaaactggggtttgctacagcttgtgtggtggtattttttggttatcacaatgcctaggagatgggtgggtgctactggaatttggttgatggggccaggaatgaggtagtcatgctgtcctgcccagaatgtcagtagtacctctgttgagaaacatggaaaggagaatcttccagaaggggcagctgaagagagtacagtcctgtgcaacgggcagaagggggatagtagcagtttgggtaacatagctgccatttattaattgttggttatgcattgggtccataaacacatctattatttaatccacatgacaatcccctaagatataattaattaccctcttttttctttttgagacaaggcatcactttgtcactcagactggagtgcagtggcaccatctcagctcactgcagcctggaactcctggactcaagtgatcctcccgcctcagcccttcaagtagctgggactacacgtgtgcgccattacacctggatgggtttttttttttttttgtattttttttgtagagacagggcttcaccatgttgcccaggctggtctcgaactcctgagctcaagtggttcacctgcctcggcctcccagagtgttagaattacagacatgagccactgcactggctatcccctctttttacacatgaggagttaggctcagggaggcaaaataacctcaccaatgtgagacaagaaaggggcagaggtgtgtgtgcagtccttacagagaaataggatcacagtcatgtcacagatttggaatgagactctggggaagagttgtgtcctgaaatcaattactgtaagaagctggaatttttggttatctttgaaaaggccccagatgttcatatgcagtttttttttctagattgaaggagggaaacttcagtggggtcttctggtcttgtttctgtgattcagttctcattactccaccagactctgaggactggccttaagatcagtgttgaataaccactctcgaagctgacacttcacacacaactgcaactaaatggaaaactgattgaaaccagccattctgattcaacattaactgaggtttatctacatttaaagtgaaatgcaagaagtcaaaacttaaggagaggaaggaaggatgagttagaattcttgagaaggaacccattttatatgattactaaatcaatacaaatcatcacataagatttttatcaaatattatgcttatttgtgggtttttgcacacatatttcacattttaaaatcatcagggaacctcccattcccaattttctgtaatttttttttttttgagacgaagtctcgctcttgtcccccaggctggagtgcgatggcgtgatcttggctcactgccacgtccgcgtcccgggttcaagcgattctcctacctcagccccccaagtagctgggattacaggcgtctgccaccacacccggctagtttttgtatttttagtagagacggggcttcaccatgttggccaggctggtctcgaactcctgacctcaggtgatccacctgcctcagcctcccaaaatgttgggattacaggcgtaagccaccgcgcccggccaattttctgtaattaaatgattggaaccacccccttggtaaaaatgaacacaaaagtaaatttttaattagtgaaaaggggaatcagaatatgaggatgatagacacttgtatgggggcagagggaaagagatctaactaaagtggtgattgtcttcaggaataaacactgcatttcaggaattctaatccctacgtgtggatctagggtgaatgggtgtctttccagatcccgcctctcccaaaccccgcgtagacactagatggcgctctccctttgcagtccttggagtcggagcgggtctcctaaaaagctgcgccggccgcctggcctaagagaattgcgttcagtgaagcgcagaagccgaaaggcgccttgctgcggccgcgccctgtggctgaacttaggccaattccgagcgagaccgagacgcagggcggcggtgggggctggaaggggcctttcatccactccagccgcaggacccctgctgcagctcggagcacgcgcagcaatgcaaataacacattcgaggagagcagaggaggtggctagccgcagcttggacagttggaatgtcggagggactaccctgcaaatcacagcccttctatcgggattctcagctgggcatgatggaggcaaatttggaaacctaagagtaccacttgccttcctctctcattgctccatcaccagcctttggtggtggtgaaatattcttttcagttttccaaagcaaggaagtattttctcacaaaatagggttttgctgaattctcagtttccacccaccttccgcctaacatttgtaaagaatcgggcatgcaggatggggactatgggtcaaaaataagtaaaggtgttgactcttctagagggcccacccagcaggtgagcgcgcgggacagagtctccggagagccagcgccgggccctggtggcctcctgctcttcacatctcaaggcagagcctctcaaagagtggcctgcaaggatctgaaccaccagggggtgtgatattgcagagtccctggccttacctcaggctccttaaaccagaatctctgcgggtggggaatcagcaggttatgaggtacaaccacacgaaattgcctacattcgtctttttgtaacctacagaaatgtccatttcgatacctccagctgattcccctgcaccttaaagtttgagcatcgctgctttggcgttttagagcccttggacttgttcacaagaggaagagggagaagaggaggctcgaagggggcctttatagtggatacctgtttcactcggagctcagggtctttgacgcgggaaggcaaagtctgtcttttggaaatggggaagtgggcacacagcacctgagaacaggagggctcgagacctcccaaagagagcagggggcctggtttgggagcttgcagtagcttctgccccagtggaagggaaagagcctggctcgctctcggcgcgccacatccggctgccgcgcgcacctggggggaccgccaggttcggggtaggcgagcgcgtgagcggcacggggctggcttctccacatctccggtagggcggggatgggggagaggaggaggagagaaagtgggggcgttatgggcttaggcctgcctcccacctccccacctcccgcctccgcggccaccctccgctctataattggctgccggcgggccttcctttcctcttatctgatcctgggctcccagctggagaggcggaggcagctccagggggctggaagtggaagcgcagcggcagaaggagagggagagagaaagagagagaggctaattaaaaaaggatactccgagggaagagagcaagggcggtgcgccgccaaggaccaactagcggcggagcttcgatcttgcctaggcgcggagagctcccaacctgggctggaaccttgcccagcacaggtcagttcgtctttctctgctcttctttggctcggcttcgaagtccattcatgagcaaggaaaagtggaggcagcgagccacctgcagacgcaatgcagttccatggactttcttttcacgcgcgcgcccagaatggactggggacctttgggacgggatgggacgggtacacctggatgccttttcgcggggttcacggtgtagggagattagaggcattgggtgatgagagcgcagggatagtggaaataccatgtgctgctccgggaagcttttcccagtgtttgagtgacgtgagcgtgtggcgggaagaagctgcgtttggctgcgggacagtggcggctccagcatttccatatagaaggggcttaacaaaggcggtaatttgggtgggatccgtcttgaagggctgtgtgtgcataaagaacacgctgtttttatttatcttgtgtttgggatagcttgagagagctgctgatggagatcataggggacgaaactcacccagtcacctgttggctctgctacagatttgggtagctgagaaccaggcgctggacgcaaagggaaacagctaggtagagctcgatgatggaggatggggacagtaggcgctcctccacctctctgcgccgggaggctgggatgcttcgtgcgttttgctttggtgccagaagccaggaggttgcggttttgagagaggcaccgccaggttgtaatattggagaatcctctccgctttggcttgccgacctctcacttgcccccttttatctctctgacaccccccgcaccccgcgccccctcaggcctcctattacacagcgcctgggcggataggcatccggggcagctgggcttcggcgcatggggccattacagtggcctcggtcctagggcagagcctggaggccgccggcaggtccaggaccacaggtgctcagatcttggtgctgggttcttgggtcctctgtggctcagggttgctctgctaaggtccaggagggttttggacctgtccttacggaaagttccgtgtccaaatgaagcttgtgtgcagctctcacatgggccaggatttccccccaaacattgcttctcagagtcccattacttctgcaagttttggagagtcctctgttggcagcagctgaagggggtgggagtgggggcaggaacaagagaaagatgggagtaagtctttggtggctgtggagaggagagcagaaatgaaaatggattttcctgaaactcctgttaaaggccttggggcccctcctctactgagggacagggagggcactttttataatacttgcagtaggtgatagagaggctctcttgaaacccagcaaacaggctttaagctggatgcagtgaaggaccggtgttctgtttctgacagcatggtccagtctgcacatagagaactcactggtaaatttagaatgagtgaatgaataaatgaatgaatgaacagcatgtgaatatttggtttttcagaagagtaacttggattcctttgaacccaagtgcttcgctattataaggtaaacttcagaatagttttgtttgcttgtttttaaaacagctttattgagatataattcatatacctctcaattaaccaatttaaagtgtacaattcaatgatttttagtgttttcacagagcagagtaaatccaccattttagaatattttagcaccccaaaaagaaaccctgtacctattagcagtacctccccatttctccctaacctgccgccgtgtctgtatggatttgcctatttcggacatttcatataaatggaagaatacaatatgtggtcctttgtgactgcttcttttacctagcaaaatattttcaaggttcatccatgatgtacaggctatctttcttattctctcagtaaatactgggtatccatcctctccttctccctggggatccctgagccaggatagacctgaacctccactgcagccctgacctcctgtgggtccctttgaaaggacaggcgccccactggtaaggcctcttagtaattccctgggaagtattccttggaacccatcaggattcctggagcagttttggatggatcccagccttcaagattgatgggaggaggctcttggcacttatcctgctgcgaaccgtccagctgaggatttcagagaactcttggggccctccacgcatgtcttgatttttcagaatcagccagggctgctcttaaaaatgggctgaacaaatcgatctgatttgaggggctctagggaaagcccctagctcattaagaagacctcttggggagtctccctttcaatcttaaatatttcctagtgtcacacagtaaaacacaaatgtcttttgctcgttttcagttgacagcctctgcagtgataccactgtaaagccacattcgcagtcagtgttatctaaacccagccaaatgactgctgttttcctggcctgtctagtgtaacctaagatccctttaaaggacaagagccttcctagaactgctgcatgatggagtggtgctgtttgagcaccactgagttaacaaattatctgggattatgatagtccattgagaacaaagttgttggtaaacggggcactagttgatccccccagggaactgacagtagagtggagggagaaagtttaaaggaaagtgataaaaataaactttcttcttggcaggtttgcccctcgatagtgctggatgttaggaaaataatcattctccttgacttcttctgtgagtaaataaaaaatggcagggatccagttacttttctgtatacactaagcttttgttgtagaccaaactgcatcctgttcctgtgacgtgtgtgtgtgtgtgtgcgcgcgcgtgtgtgtgtgtgtgtgtgtgtgtgtgtgtgtgttggaaatgttggcatattttttgagtacttactgggtatctgcctttttctcttttagaaacacacttaagtctcccagttacttggggaagaaaataatattcctcctttagcaatcactgagcttcaaggataaaaagcaccttgtatgggatcacaaagacagcaagtgacagaaatatgattaagaaaagtctatatggggccaggcacagtggctcatgcctgtaatcccagcattttgggaggatcacctgaggtcaagagttcaaggccagcatggccaacatggcaaaaccccatctctactaaaaatataaagattagctgggcgtggtggtgggcacctgtaatcctagatacttgggaggctgaggcgggcattgagaatataaaagagagtctataggaaattctgagcgttctttaagtcaaagtttagagcctagactccccgtttcctccaggtaatttttttattagtggtcttgttgcacttttctctctatgggcctttgtcggagctaccctgaaaggtgtctctgtgaattttagagagcaatgttttgcctcatttctcctagaaattatctgagttgcttacaaaaattggtccagaggtaggttgtgctttgctaagtccattgcaatgtcttagggtgtgtctttatctaggagcagtcagagggcccattattggataaagatctatttctgggtggccttttgtctctggcttttgcaaagaggagaacatttaattgatgtctaaaaatgataatttgctgcaggttgtttgcttctgttcttccttcacttcccagccctgtctcctgccatgtgctggcactgtgctaagcattcaaaatacagtagggaataatatgctttggcaaatggaaatgccaatagctaactacggggtagtgttcaatgctgcagaatggaaaataaagattactactataggaaacaggaagagcacctgaccccagacttggaagatcaaggaaaacttcctgaaggaaaggatgtctaaactgagatgtaaagctaccctttatactgattacagatgtacattgtagttaaaaacagtctcccatttctttgacagatgaactatgtcagtgtttgaaaaaaatgaagagagggaaaaaaagccaggtgaagaacattcttgtgtcaagcagctgtcattccaatttgccatacttttggaatggctctaccttctgtcatttagaacatacagcatgagtttaatactgattgagcagctgtataactgaggctaattttcagtcaaattccttgcgtttgagtgattcacagggatgctgctaacctaatatagtttttctgtaaattagaaaaaggaagcctctctgtgcaaacctatggcatgggagaagaaaacagttctgttttatctggataacacagctttgcactggggcacacaacttgggagcagagtgtctgccaatttcaagtgtcattgaccctaggcgaagtgtaaattgtttagttcattaactgcgagctgtacacacattagccctgatcattcagtcattaactattaaatcaatcaatatttactgattgcctatgtgtgttgaactttcttgaatatgggttaaactgcccatctagatgtctgatagtgcccaagatctagaaggttaaaacagtgactgaggccatgaaactagctggagaacctcaataagatgagggacagatgcagttcatcagaggcctggttggtgaaggatcaagtttggtgctactgctggttggtgcccatccacaaactgttacctgcctctgataagacaaaaactacacgatgatgtaaatcaaatatgtcaataagcgcactgttcaccaagcacactgttagttcaacggagattatcattattttttcatagcaaagcttttctgacgaaggaagcaaaagaatacatagacttgcatattggcataagctccttatctcactgaggaccagtaacagttcatagaccagctactttgagtagcaccaatctaggcaacattggcccacatttggccagataggtcatcttgtatcctttctgcctttatactgttttcttttctctcttttccccttattttttctttgtttcctctgcctcctcatcttcttcctcttcatcattttcccttttcttcttccttcccttattcctactttactgttgctttccccttccatttgatatttctctcttaaacaaaaatcactgtgcattttattcagctttttgtcttttaaaaagcaaaataaagaaagcctacgtgtacaaggaaagaaatgtaaaatggaaacatcactaacttggagaaaattaaaagaatttaatggtaattaaaataaaaatatgccaataaattagaaagcctggatgaaatggattcttttttttccaacttttattttaagtttggggatacaagaacaggtttatgacataggtatatgtgtcatgctgaagtttagggtatgaatgatcccatcacccaggtagtgagcatagtacccaaaaggtagttcttcaaccctcacccccttttttttccttccctcgctattagtccccactgtctgttttctcatctttatgtccatgtgtactgtttagctcctacttataagtgagaatatgtggtacttggttttctgttcctctgttaattcacttaggataatggcctccagctgcatccatgttgccgcaaaggacatgattttgttctttgttatggctgtgtagtattccatggtgtatatgtaccacattttctttatccagtccaccattgatgagcatctaggttgatttcacatctttgttattgtgaagagtgctgtgatgaacataggagtgcatgtgtctttttggtagaattatttatattcctttgcgtatatatccattagtgggattactgagttgaacggtagttttttaagttctttgtgaaatctccaaactgctttccacagtggctgaaccaatttacattcctaccaacagtgtataagcatttccttttctctgcaaatctgtttttttttttttgactttttaatgatagccattctgattggtgtgagatagtatctcaatgtgattttgatttgcatctttctgatgattagcaatgtggagcattttttcatgtttgttggctgcttgtatgtcttcttttgagaaatatccgctcatgccctttgcctacatttttaatagggttatttgttttttgcttgttgaataatttaagttcattatagattctggatatcagacctttgttgggtccatactttgcaaatactttctcctattctgtagattgtctatttactctcttgatagtttcttttgctattcagaagctctttagtttaattagatcccacttgtcaatttttgtttctgttgcagttgatttgaggacttagtcatagattcactgccaaagcctgtgtctggaatggtatttgctaggttttcttccttttttcttcctttcttttttttttttttttttttttttttgagacagagtcttgctctgtcaccaaggctggagtgcagtggcgctatctcggctcactgcaacctctgcctcctgggttcaggcgattctcctgccccagcctctctagtagttgggattacaggcatatgccccaccatgcccagataattttttatatttttagtagagatgaggtttcactgtgttagccaggatggtcttgatctcctgacctcatgatccacccgctttggcctcccaaagtgctgggattacaggcatgagccactgtgcccagccgatatttgctaggttttcttctaggatttttttataatgttagatcttacatttaagcctttaatctattttgagttaattttcatatatggtgaaaggtaggagtcccatttcattcttctgcatacagctagccagctattccaacaccatttattgaagaggtagtcctttccccattgcttgtttttgttgacattgttaaagatcaggtggttgtaggtgtgtgactttatttctgtgttttctaacctgttccgttttctgtgtgtttgtttttgtaccagtaccatgcttttttggttactgtagccttgtagtagagtttgaagttggataatttgatgccttcaattttgttctttttgcttagaattgctttggctattgaggctcttttttggttttgtttagaattttttttttttctatttctgtgaaaaatgatgtaggtagtttgatagcaataacattgaacctggatattgttttgggtaacgttcttttttttctctttgaaacagagtcttgttctgtcacccaggctgtgttttgggcagtattcttattttaatgatatgaaatgagttatttttaaacaaagtacaaattactaaaactgattttttattatacaggaattatgaataaaacattagacacaaacatgttgaaaaagttgttaaaaagtaacctctccaagagtactgaactctccccatggttttgcaattgaatgctaatgaaaatgtaaaaaaataaaaataccgtgctattataactgttccggccgggcgcggtggctcacgcctgtaatcccagcactttgggaggccgagacgggcggatcacgaggtcaggagatcgagaccatcctggctaacacggtgaaaccccgtctctactaaaaatacaaaaattagccaggcatggtggcgcgtgcctgtagtcccagctacacaggaggctgaggcaggagaatggcgtgaacccgggaggcggagcttgcagtgagttgagatcgcgccactgcactccagcctgggcgacagagcgaaactccgtctcaaacaaaaaaaaaataaaaaaaaaaaaaataactgttccaaagtacagtatagagaaagaagaaaaaattctgttattttttataaaactggaaaaaataatactgatatcaaaacttgacacagcataataaaaaagaaaagctacagattaatttcactaatattgatgtacttattgatatgaatagcatattagtaaatagaacccaaaagaataattcacaatgatcaagttgggctcaaattttacaggtaagtttagtattagaaaatggattaatataattgtcatgttaaaaagttaagagaaaaaagttagaggatattcttcataactactacaataatttaacattttatttcagattaatagctcaataaagtttacacagatggaaatttactaaacatgatacatttatatcagtatatttgtgtttgtcttctctaacagtctgtctagccatgtgtcttcaaaatcaaagtcatgccaaagaagcattgctattaaaaataagaacaagacaaagtttccaggataaatattctggagatagtagccaaagtaataagaaaagggaaagaaatgaaaaacataaaatttggaaggtaagaagaaagatatcatctacagaaaaaattaaggaaatcaattttacaaactttaagactttgaaaaaatgttaaactattcaaggtaggttacaaaattaatataaaaataaaattgctttactataattaataaacaacttgtttaaaagtgattaagaaaaatccattaacaggaaataaaacatatatgtatataatatgtagaaataaactcaaaatgtcaaatttatataactctttaaagtgctcatgaagaaatgaagatgactggcttgaataaacaaagaatatattcttttttgatgtaaagatggactattgtataaaaaaggtcgatctacctaaattggtctactaatttaacatgatcccaattttgaggagtttttggtacctagtcaaaaataatcagaaagaaaacttaaaagaaaatattaaaacatattataaagttttgatatttacaattacttaatagtcacacataaatagaaaatcgatagattcgaaaataaaatatagcattgttaacctgtgatcaaaaggtaaattattctataagtggtattggactaattggatagacatggagaataaaagttaaaactttttcatttacatcaaaataagttttagatgatcaaagatttcaatttaaaaattgaaaatgtaagaatactaaaagaaaatataggaaaatgctataattccaaaggagaaagagacttatatgcatgtcataaaccataggagataaaaaagaaaaaaaataaatattgggcaacgtgttttatcatatatgatggaaaaagagccacatattaaatacaaaaatttctcataaaaagatgaacactcctagctgagtgtggtggctcacgcttgtaatcccagcactttgggaggccgaggaagtcagatcacttgaggtcaggagttcgagaccagcctggccaacatggcgaaaccctgtctctactaaaaatacaaaaaacagttgggtatggtggtgcatgcctgtaatcccagctatttgggaggctgaggcatgagaattgcttgaacctgggaggtggaaattgcagcgagccaagattgcaccactgcactccagcctgggtgacagagtaagtgagattccatcacaaaaaacaaacaaacaaacaaaaaacagatgaacaatcctatagaaaaatgaccaaggatatgctagagagttcaccgaacaaaagacagcttaagtaaatgaaagatgtgcagtcatacttttagccatggtgatgttatatgttgaactacaattttttcatacatgaaagaatttgtaaatatcagagccagcaagtttatggaaaaatagacacatatacttttggtggtatataaactggcataatctctctggagaccaatttggcaatatgcattaatacttttttttttctttttgagacagtgtctccctctgttgtccaggctggagtgcagtggcacaatcttggctcactgaaacctccaccttccaggttcaactaattctcccacctcagcttcctgaatagctgggattacagaagcgcaccaccacagcctgtctaatttttgtatttttagtagagatggggtgtcaccatattggtcaggctggtctcgaactcccaacctcaggtgatctgcctgtcttggcctcccaaagtgctggattacaggtgtgagccctgtgcccaacccattaatactttttaaaaggaataagcatactttataaccagcagtttaacttttagcaaactgtcttagagaatatttgtccatgacttttttgagattttgattaaaattgctttgaatctatagattatcttaaagacattctaacagagtacttttttttttttaacccatgaacatggtgcactgctctatttaggctttctttcatttctgtcagtaatacacttttatattttggtattctgaagagtatagaggccttgcatgtcatattaatttctaactattttatgtttttgatgtcattgtaaataaatttaaaatttttttctttttatttattttctgctattatataagaatacaattgattttttgctgactgatcttgtctgtcagtctttctaaattattagttcaagtagggttttgtttttggtagattccttagaattttctggtaaacaaccctgttgattgtgaatagagtcagtttacttcttccttcccattctttctgccttttatttctttttcttgcctgattgcactggctaggacctctagtacagtgttgagtggaactagtaatagttaacatccctattttattcttgatcttaggagaaaagcattcaatattttaccattcagtgtgatactagctatggagttttcattgatgccctttattagattgaagaagttcctttctatttttagtttgctgagtttctttaaaatcctgaatgtgtattgaattttgtgaaatactttttgtccttctatttagattacacgcacacacacacacactacatatatatatatataaaatctcatgctaaatgattagtggatattatcttgatggttagcctttttctccctgagggaagaaacatactaaacatgctaaatgatttaaaaatattaaaccaatattacattcctgtaataagctctacttggtcatcattattattattttttacattgttaaatgctatttgataatattttgtgaaagatttttatatctatgttcataagggttattctgtgatttttattttttgtgatgctgtctagttttgataaaaaggttatgttagggctgggtgtggtggctcatgcctgtaatcccagcactttgggcagctgaggtgggcagatcacttgaggccaggtgttcgagaccagcctgggcaacatggtgaaacccccatctctaccaaaaatacaaaaattagccatgtgtggtggcatgcgcctgtagtcccagctcttcgggaggctgagacaggagaattgcttgaacccggtaggaggttgcagtgagccaagattgcgccactgcactccagcctgtgtgacagtgagagtctgtctcaaaaaaaaaaaaaaaaaaaaaaaaaaaaggttatgctagccttcacctgtgctttcaggaagagtttgtgtaggattggtattatattttccttaaatatttcatagaatttgctagtgaagccatctgggactgtaattttccttgtggaaatattttttaataacaaatttaatctctttaatagatatagggctatttgggttttctatttcttcatgtgtctgttttagcaagttgagtatttcaatagtttatttccaagtaagctaaattgttgggattattggcaaaaagttatttgtatttttcctttttaattgttttttagtttgtgaagtaggcagttatatcctctgttattcctggtattgttaattgtgtttcaatctttgttccttgatcacacttcctaaaggtttttaaattttattaatatttcaaagaagcaaatattggttttgttaatttctactaatgttttctatttctttagtatttgcttttatctttattaatcacttccttcaacttaatttggattcagtttgctcttctttttctagcttctttaggtaaaaaattagagcattgattttaaatctttcttcttttttatatcaacatttaaacctataagtttatctctaattctttagctgcattccacaaattttcacaaattgtacctttattttcattccctttcaaacatttaaaaatttccgttgtgatttcatctttgactcattgattatttagaagcatattgtttaattttcaaatattttgaatttataaagatattttattattattcatttttttttaattagatgaggtctttctgtgttgcccagttgtctcaaactgctgggctcaagccatcttacacaccttgacctcccaaaatgctgggattatgggtgtgagtcaccatacccagcctattattcatttctaatttaaatctattttcagaaaacatacagagtatgtttttcaatcttttgaaatttattgagttttattttatggcccagaatatggcctattttgttaaattttactgttacacttaaaaaatgtacatttttgcagttgttggatgtaatgctcaataaatatcaactacttgatagagttgttcacaactctatcaatatatctatataccgatatatatctatcaatatatctatataccaatatattgtctaattgttcaaccagttcttgaggagtgctgaaatcttcaactttgcttatttcttatttctttagtcctattagtttttgctttatgtattttgaaactccattattaaattcacacatatttatgattaatttttcctaattaagtgatctttatcattctgaaatgtccaggatttgagggcagttttatgcagattttgctccccctgcccccacattgtgtctcattccattctgacatttcccttctcaatatctagtttctctagtattcctgaattctgttccctgatgctttatgccagtaagacagcagctttccccctgatttctgatcaccatgccatgcatagtggggagttccttcagagagaaaaaagctaaccaccaaactaataggaactaaactaggtcttctttattcctaatttagagttttttcctcctatgtcatgatgctaacagataagtgtaataattgctcacttcctccagtactttttaagtagatctcgttagctaatcttgaaaatccttttatgattctggatgtgaggagggtagtatttcaatagtgagaagaaatgaggaggaatattttcaaagctaacacactggatgatacattaagcctatttcttttgttgttgtttttttggtttgttttttaatttacaaaaatgtgtgacctagatcatcagttgactgtaaaattctctttctataaagtagatatgaacatatatataaaatgtggagttgaggaaggcatcctagagatcattttatccagttctcttgcccccaaattcaggaatccctttgataacatctcttatgagtaaaacttagctagcttctgccccagaatttctagtgacagagaagaaatgcttctaactgttagagctgttacagaactcctgtgggttgggagcatcccaactgattagagttctgttttcagaagctatgtaaaataatactgttttatcttctacataaaactcttctaatatatgaaaacttctgttatgtgtctctgattcttatttttctttcgtataaaatatgcttaaatatcaccatttctttcaagtcttctttgcctgaacttgtcagttgtaactgctgagtccttttttaagcctatgaattactcgagtcaggtcgcccatgtcttcatatggttgatcatttcaaacctgtatagagctatcatctggagaatgataaaaatggctagaaatgtattttgaaaagtctaaactggttcactcttgcaaataactgttgcctctgtcattatctggatattcagtttttgcctaaacttttttgccaagttagtcccacaaccttaatgtgatagaagagataaagtcttcttgattctccttccttttttagcatctgctcaagtagaaaattcattatgattcccctttccttttttgctatttcaacatgttgcgatcatgctaccaattagaaatttttgagagttatctgtgttctaagtaaattaattaaaataccacaatcatcttaaaaggtagacatagccaagtgcggtggctcatgcctataatcttggcactgggaggcggaggtgggaggattgctggagcccaggagttcaagaccagcctaggcaacaaagtgagatcctgtctttataaaaaaaaataaaaaaaactagccaagtgaggtggcatgggactgtagtcccagctactcaggaggctgaggcaggaggatctcttgagtctaggagttcaggcatgcagttggccatgttcatgccactgcactccagcctgggtgacagacagagatcctaaaaaaaacccaaatcaaaataacaacaacaataaattaatgaattaaaaaataaaagatagatattatctcacacatttcattgataaagagcagagagtggttaaaccagctagccaaggacctatatatagcaaattatcaccacaagtggcttcctcactcacaattttctattcataccaccacctgtgctacctttctgttctgtttcatacttatttcattcggttttgcaatatgattgctggcaatcttgcttttcaagtaaattgtaagtgagctcacctaaggttcacttttcaattcatctttttttttttcaattaactttaagtgagctaccaaggggaagatatggtacgaagttttgtatctttcttattatcaagtacagtgctttggttatatagtaggactcttaataaatgattgttgaaatgaacatttaatactataaataacaatctccctcagggcatggagttgctggatatatggtataccaaataactaacaagaatttcatttaagtttatggtttattttttgtaagtcaccaacgattgaatacaatattatccaaggtttgtgtgtatatatgtgtataaatctcggcgtgagagagagtgagtgtgtgtggtttacgaaaacgttaggataaatatttaaggaattttgataaaattggctgtatgttagtctgggaattttgtggatgcctgtaagcattgcttaatgcttacactttgggcctttgctcgttattaaacttatctggacaaatgagattaaataaaacaaacatatgagtggaagggcaaattagcactaatgggcctagttttatgttactgattgtaaaattatgacagtgttttaagagcacttgtattaaacattatcaactttccataaatttggcttataccttccgaatagagaactaagtagccatttctaacatgacgtttttaaacaagagcaaaaaatcaaggcagagttatttgttttgtgcaggctttggggcaaagttttaacaaattaggtttgacattttggtaaatgttaaactatctcatggcattttaatagcattgggatttttcttgcccttactttactgtccaaaagtttggggacttggcagaaaagcttgggaaaactgaaatttcacttctcccaatgtggtattgctcatcctaacttaaaataaacaacaactaaagaagaatttatgctgggcacagtggctcattcctataatcccagtattttgagagtctgagaagggggagttgcttgagcccaggagttcgagactagcctgcacaagatggggagaccacatttctacaaaaaatttttaaaaaatcagcaaggtgtggtggcacatgcctatagtccagctgcttggaaggctgaggtgggagaatcacttgagtccaacagattgaggctgttgtgagccataatttcaccactgcagcccagcttgggtgacagaagcagaccctgtctcaaaaaaaagaaaacaaaagaaaagaaaaaaagggttttaaagataagctatggttacaatgctttttccatataaataatgcccagtttccaaaaaaattgccaagactagcatagcatttatttagttagttaaaaagtacatgagatgcagattaacctgcaatattacatgttaagtattgcttcaaaacacttggatgcaggaactgctttgatgagaatagagaaaggctatttgattgtggcctttcacaataggagaaaaaggttccttttccctatgttaaagaggacctttttcttctacattaaaacagtattatgggtatcttttaacattttttaatttaatttttaatttctttttgtagagtcagagtctcactgagttgctcaggctggtcccaaactcttgggctcaagcgatcttcctgccttggcctcccaaaattctaggattacaggtgtgagctaccacacttggccagggatgtctaatgtaagtctcctgatctgaaaaggaaattttttttttctccaaaaagacaaacgtggcctgtttttttttacctttcttttccttgctttgttctgattgaaacctctggttataatgtttggaaaaggaaatcttagaatatttcattggagttgagtgattctgctgcaatatgtttctttgggtgtggtggacagctatctgtgtgactggcagatttactgaatgttttgatttgatagggctgaagcctgctgccatatcttttcaaattctcctgcactcatgccttctgtctacagaagagctgcttatacttgtttggataatccactaatcttgttttacttgactttgtagggttagggttatatgtataccctggggcttttcctcccatagttcatcaacttttactaaccattttcccaatgtcttctgtgttctgataaattaatccaggctataatgctatatagatggtagtcacttaatatgttgactattcttttagcatgtacactgaatgtattgcctattccattaggaattttaaggaatttccagtatgtgaatttgttaatctaagaaaacattctttactaattagcattttggtggtaggccggtaggggaagatatattttgaaccctaagcacaaactagtacattctttaatttttattgcaggaccttaacttgaatatttgtataatgatcaaagtatatgggtctcccttttattggcaacataaaagagttgtatactagactgtgattggatatttaaaaaaagcttagttgtcaaaaatttttttatgaatggttgcttgaaggaaatataattaatttattcctttagatataccatattattttgaaataaaacccaagtatcagagatttaactacgtgagtcatgttactttgaaagtttacgtaactatgctttgctgcattcatcagaggcttttgcacttaaagctactacctgaaagctatattaatctaccccactcattctattcacagaattgaatgattgtaggagttatagaacccaacatcccacttgatacagtttttccttcacactctccagactgaaaggatgcaaacaggattgtttgaaaatcttcaggcctagctccagtctaaagcctgattggcatatgccttaccagattatagatgttgtttcaaagaacagactagtgcagtatctctcaaaagaacagcatccaggactgggggaagtagcataacagcaattaaaaaatacttgggactggccgggcacagtggctcacgcctgtaaacccagcactttgggaggccgaggtgggcggatcacaaggtcaggagtttgggaccagcctggccaacagggtgaaaccctgtgtctgctaaaaaaaatataatacaaaacaaaaaaattggccgggcgtggtgcacatgcctgtaatcccagctacttgggaggctgaggcagaagaattgcttgaacccaggaggcagaggttgcagtgggccgagatcgcaccactgcactccagcctgggcaacagagcgagactccatctcaaaaaacaaaaacaaacacacaaaaaacttgggatttaaataaacaatatggagtattttttaaagcattcaagggggtcagagtctccaagctttgtaagctaagagatagcttgtactctgcttggtataatccctctcatggtgggaattttatccggacattccattatcaaagatcttgaaatggtaatagtatggagatactagataaatgtaatgtgacttaaaatatcattgtaataataatttttaaaatactcatactcttccatttgggggtaaattacacctagaatagtattctcattcttattcctcaagaagaattaatattcttttgagtcctgtaatcagtcatacctagttttgagttgcaattaggtaacttcaattgatgtgtttttattgttgccactggagacatatatctatagtagagaaaattataggaatttaaagctgaacacattttgataaatgataagcatataacaaggagtgtttgcacttgattagtttcttaggagttggacagaaacaatcttgagctgtctctcttgttgttcaagaatataaaaaaacagtagctcaaatgtagtatcattattaacggaatcttatttaaagaatgatatgtcattactatctctatttgaaaatggcttggcctgaaagccaaagccattataattacattaatgtttaaaaaaagcgataattgccataataggtatgaattatttctatatttcaaagatagattaatgctagacatatcaaaatatgttaactacactgagaggtcaagatgaaatacggacattccaatgaatgaattgtcataaaggcaaggttcagcatccgttcttgatttaaaaaaattcttagtaaaaagacaagaacttttaaaagtttgacataacatatctgaactcaactaccgttaatattcttaatggtaaaatatttcaggcatccctagcaaaataattgtttttaaactactaacctatacagtaagaaaaaacacgtcgattgcaaacaatgcagttgtcaacttggaaaatccaagagattaaactgaaaaaaatataaaggtagcaagaattcagaatggtggtccattaatatataaaatcaatatcttttctatattaaaaacgaatctatcagataacagtgttggaaagagtccattaataacagaaactaaaaagttaactagaaatatactttggggtaagaaaggccattttacccatgacactgaattagaaaccataaagaaaaagatcaagtcagatttctgaccttaaaaaaaaaatcttaacccagtaaatgaaattgtcaggcaaaaaacaaactggaaaaatactaagtatatatgagttaaaattaacatataaagagttattgtagatcaataagaaaatgggtaaaagtcatgaacagttattttgtttaaaaaaatttaaatagccaacaaacaccaaatgtcacattttactggttatgaaaaatctgattaagatgctaatcccattttacctgtaaaatcagaatatattgaaaacaacctctgtgatggtggaagtgttgtgacctggtgttcatatgagatgcaggtggaagtggaaatcagtgttattttctgtagagcattgtgtacctatattagaaaaaccttaaaaacatgcatcttgggctgtgtgaggtggctcaggcctgtaatcccagcactttgggaggccaaggcgggtggatcacctgaggtcaggagtttgagaccagcatgggcaacatgatgaaatcccgtctctactaaaaatacaaaaattagccgggcgtagtggcacgtgcctgtaatcccagctacttgggaggctgaggcaggagaatcgcttgaacccaggaggcaaaggttgcagtgagcagatcgcaccgttgcactccagccctggggacaagagtgagactctgtctcaaaacaaacaaacaaacaaacaaacaatgcatcttgttttgcctagcagttctacaattgggaatttagccaaagtaaataaatcatatattaaaagagatgtgaattaggatgttcattgtggtgttatatgtataaacgaaatttggaagcaatctgtatttccaaataaaagtaggtaaataagttgtgataccgcatatagtaaaagggcatttactgtcatcagaatacacttgaacaagaaaataataacaaaagatgtattgtttttgttgtactttgttgtagtctgaatttttcactgttaaaactctttgtttttgtaagcagaacaaggtatttttaaagtggaaagaaagtgatgtgaaggctgatcttgtagaaatgttttcctaagatgcttctaccatgtctgatcatgtctatgtggttaaaatcctggctcctgaactcactagctctgtgacttgggcaacttctctgtgccttattgtccatctgtaactatgtattagaattgtacctacttcaaagagttgctgtgaggattaaaggaatttatatgtgtacttggagtagtctttacatacagcaagggctcaatacattttatggttaataaagtaagatgactttttggtgtgaaccatgggaaaacttctactcagctttcggtatcagaaaaagctatgcatctcctgaaaaatatgttttagttaatctaaaaatatagtaagctttaaagcttattatgcttccttcttgcttagctgctaattcataaatttttaagccaaattcagcaactataccttactatagtaaggtataccttaactatcctttaccaactatacaggaccagatacattttctctgtgctcatttaactcattactttattgttttatcaccaaaatttccccttatactaggattgctggatcaaatatatgacactcagttaaattttaattccagataaacaatgatttttttaaaaatagtgtttttcaactattacatagaacatactaacattaaaaaatcatttgctatttatctcaaattaaaatttaactatagtcctgtattttacctgtgaaatttggcaccgttatctgatccattatgtttatttattatttagttgcttcagatcctttgtgggataatactgggaaatgaataaacgaatatataaatgaaaaaatgaattaaaaaatatgccctgggtagaagaaaactttggagatatttccttaatctctgagggaaggatttcagaatttctcctctgtaatgacctagtaatagaattgtaatctacaatttgtagaatggtcttttaaattaatacagaacattcattgttttttcccctccaattctgcctctctccctttctccctccttctttcctttccctttctttcccttctttttctaaaagttttttaatgttaaaatttttattattaattattatagatacgtaataattataccctttcttttttcttcttcattttcttgtcttccatttatcgtcctttctttcttttgcttgtagctcttctttcattgatatcccattgaaaatgaacaatttggaagagttttagattcacttatattaggaaaaagaagaactatgagaaaaagatgaaaggattaggggttattcaacccagtgaggggaagtctgagtacaaagtggtttttcaaattctcttggatcaccagtagaaaggtcctatatatttgttctttgtaggcaatataagacaacagtaggagtttatgtgaactttatgtgacaaatatgggaggaacacattactggcaaggacattgggattgatgataatgctaatttcaggtaaaattatgaaatttatccacttgggaaattcactatgcaatttatgtccatagggaagagtcacaaagtacattctgaagttctcttccaaatatttcaaatcattctgtccatttacagcaccttctaaaaagtcttttcctcatcagtttgtattttagagtgaaatgcacgatgctctagggaattaattacttcctgacaatactaatccatgttggcttattcgcctgtcctaaatgattacatatactttattttcagccttctcaaaaatgttcctgttctctctgtttctaggtggctgctacaccccatgtaaaaagcggaaaataaaatgaagattttccagcgcaagatgcggtactggttgcttccaccttttttggcaattgtttatttctgcaccattgtccaaggtcaaggtaattgaaaactttgagaatcagtagggtctgggactctagctttcttgtttctgattatcattttattttatttatcctaacaatatgtcggcttttactgagttttaccaactgtttgcactgtagaaatatacacatctttgatgaggattacaacctcaccagtgactgagcatagtgattttgtggcaattggttaaataggtcattcttttttttttttttttttttgagtcagagtcttgctctgtagcccaggtatgatcttggctcactgcaacctctacctctcaggttcaagcaattttcctgcctcagcctcccaagtagctgggactacaggcatgagccaccatgcctggataatttttgtatttttagtagaaacagggtttcaccatattggccaggctgctctcgaactcctgatctcgtgatctgcccacctcggcctcccgaagtgctgggattacaggtgtgagccaccatgcctggcctattcttaaagtgcttctgaaaagcctgtgcaagtttaatcagtgaaagtcaaatttttatgttatgatatcagttatattaataatgctctaataattaaattgctttatgaataaagccctatttttacagctgtattaataaagaactgtaatgtgagtgtgtgtgtatcctaatcatgtcttgtctcttacataatgtacaggatatttctatcatttcatacctggtccttgattttgccccttttcttaaaaactgagcacatagtctgaacattataagggcctgacagagcctgccaatatgccatttcaagcattcctaatgatttctagctttgttttaattaaacttaatttgtgaaatctgctctttgcattcctgggatgggaacttttatttttgatttccattcatttttataaagtaagtctggggctgaaaaactacctgtgggccaaatctggcccactgcctatttttataaataaagttttagtggcgcacgtcatgcacatttgtttacatattgtctgtggctactttcatgctacagtgacagaattaaacagtcatgacagaaactatgtgtcccgcaaagccaaaaatatttatctgaaaagaatgtgctaacttctgaatatgcacaactgtgcaaagtgatattattagacaaacatgggaatctacagagactgaagtgttggtgatgaaatgttatttatcagctgagcaaggaattgtaaatgtgataaagtgattttaggaatgctaatgtctaatgtttggcattgagggttgtagaaaagatcaatgcatgaaccaccacacactgtttcctttaagggaggcgtacctgtttggaaaggaatggaacttgactttttgcatccacaaattgctattatacacctggggttaaggaactgtatttccaactacttcattgaacacacagcaggcagtttggtagacacattctgcttatgttatttatgttgatgaaagaatgcttttagctgtggcaattaggaaattctagatcacttatcttctaaactccaggatacaagacacagattcttagaaacaaagggcgggcaagttgctaagccctccagagttgctatctcagtctagcataattcagaagtggtaatttgtggaataactgatcatatatagctcttacgggatactttcaaggatgctgtctaccagatgaatattgttagccaaattctgttttttcatttttttttttttttttgagacggagttttgctcttgtttcccaggctggagtgcaatggcaaatggcgcagtctcggctaactgcaacctctgcctcctgcgttcaagcaattctcctgccctagcctcccaagttgctgggattacaggcatgcgccaccaagcccagctaattttgtgtttttagtagagagggggtttcaccatgttggtcaggctggtctcgaactcctgacctcaagtgatccaccctccttggcctcccaaagtgctgggattacaggtgtgaaccatcgtgcccagccaccaaattctgttttaagtgaacacttatggggcatattctatgtgtcaagttcaagatacaaagctaaataagacctatttatttatttattttttgccttcaaccaggttactgtgtactagggagacagggctgtaagcaaataaattgcaatataagttatgttgggggtgaagtgtggcagagacaaagatggaaagatagattgcagccagattatggaagattttaaacaactctgtttttgagaaaaacactctaatagcaatatcgatgattctcatatttgcaactcatgggggtttgagggataggaacaaacaagtcatgagagatcattaaaatatactaaattgtccatgaaataggtgttgaaggctggaagtaggcaatgtgattagagagaatgcatctaagaatcatttaaggggtataagagagaaaagttgtctgctgattataagtggagacagacaaaagatagggaaatattgaagataaatcaagtttcttgatggagacctgagcagatagggtctttcatcttgacccctgtgtcattactgcttctatatctttgcattgtaattgtttatttacctcagctcataaaagccaatagttctctctttagtgtctgtatctccagtacagagcaatgtttcagtcatagtagacatttgttgaagagtttaaacaagtagaagacaatgagttcagttttagacaaatatatggagcttaaggtgtctgtgggacattcaggtggagatggctggtaggcagttggtggtctggagtttagggaaaaaagatcagcgcaggagattatattcgaattgtattttatttaggaattcacttataaggatttttgaagccttagaactagaattaggaagggatatcaaagtggaaagaggtgaggatgaagtctgccaaacatcaatagagttcaataagagtttaatagaagaaaaatgactgattgaaagagtaaaaaaaaaaaatccaacatcaattataaggagagtcaggggaatgtagtggatgataagtgaaggctggagaaattttcaagaaggaagatggtggctgcacgctgggggaaacctcaataagaaacgctttagaggcctttggttttgctgattaggaaaatatgagacctttgagaaacctcatcttatttctaccattacgcctcttatttacgtgactgattttgagcaaggaataaaaaatatgaattgctttattggattgattttctgcttttaaagcaaatttagtagtgagttcctgtgggttggccaaatttgacattaatttgcaaagccaaatagacattttcagagaaaaaaaaatagtctggtggctcacgtctataatcccagcactttgggaggctaaggcaggcggatcatgaggtcaggagtttgagaccagtctggccaatatggtgaaaccccgtctctactaaaaatacaaaaaattagctgggcatgatggtgcgcgcctgtagtcccagctgctcaggaggctgaggcacgagaattgcctgaacctgggaggtggaggttgcagtgagctgagatggtgccactgcactccagcctgcacaacagagcaagactccgtctcaaaaaaaaaaaaaaaaaaaaagcaaagtcagtgtggtaggcagaataatgtacctgcaaagatattcacatataatcttcagaactagtgaatatgttatatggcaagggggaattaagatgtcagattgaattgtttgttaatcagttgaccttaaaatagggaggttagcctggattttctgggtgggcccaatgtaactgcaaaaagttttaaatatggaagagggagatagggcagccagtgtcagcggccaggtgagaaaaacttggctgggtactgctggctttgaagatggaaagagaccacaagtcaaggaatgtgagaagcctctagaagttagaaaaggcaagacaatgattgattctcccctacagaaagaaattcagcccttccgacaccatccttttagcccggtgagattgatttcaaacttctgacccctagaactgtaagatagtacatgtctgttgttttaagccactaagattttgaaatttattatagtaacgataatcaacgaatatagctagtattaaaagacattcagtatggctcacgtctgtaatcccagcactttgggaggcagaggcgggcggatcacgaggtcaggaaatcgagaccatcctggctaacacggtgaaaccgcgtctctactaaaaatacaaaaaaaattagccgggcgtggtggcgggcgcctgtagtctgtagtcctagctactagggaggctgaggcaggagaatggcgtgaacctgggaggcggagcttgcagtgagccgagatcgcaccactgcactccagcttgggcgacacagcgagattccatctcaaaaaaaaaaaaaaaaaaaaaaaaagacatacaggaaattaattcttgctccttaattgctaatccacagaatgtgctttaccatttagtctctccatggaatattttatgaaaaatgttccctctccaggacctgtgaacctacattggctcaaataactgtttaaacctggattattccagcatcttcttttcaagacaacttgttaaatgaactagaatacagaaaaagtagtgtgatggctgtaggagaaaaatgcgtacagcaataacagagtgatgggatccacactttcttggaaatttcacagtaaatatgtacctggttctagcgatgtttgttttggatggttacaggagggagccactgaaggtaaaataactcatttaaaaacctcgacgcatagaaaattggagacttcgcataggggctagctttaactttataaagacctctgtgttcacacgttgacacatatttcttgctgttagtagccaaacacatttgaaaagttgagaatattttccttacagctgttttcagcatctttataatggatcatgaaattacaacatatgaggttctaaaccacattaaaaaaaaatccctgtagcatatcctacagtaaaagtctctcaaaatttaattgctccgatttataaaacatttaggcagtacatttaactgaaaaaaatgactaacataaaaagctaaagtttttgtattttattttatttgttgagccagagtcttgctatgtcgcccaggctggagtgcagtggtgcgatcatggcctccacgtcctgggctcaagtgatcctcctatctcagcctcctgagtagctgggaccacaggcccatgcaaccacactcaactgatttttgtatatactttttagagatggtgttttgccatgttgcccaggctggtctcaaactcctgggctcaacgaatctgcctgccttggcctcccaaagtgctgggattacagacatgagccactgtaccccgccaataatcaaaaaagaatttttttgtttttagattacttggaaaaatagccaaatacttttctgctgtttaaaagtcttttaaaaataaatataattggttgccctatcaacttagcatcctaaaatatgttttaaagaggtaaaaactctcaatgtgattcatgctgcattatctttatcagccagaaatttttggttgtgaataaaataaattttctctggtcaactaagcaaaaatgtattcaccagtaggtaatgcagtagctcatataatcaaagtaaaagtaaataatcaagctttgaaaaggataggaatctgggaaatcctctgggatacagtctgtagaaactagtgaccattttccttagggcatgtcattggaatgactggagttattttccatccttgcatcactggagtcaagtttcagattcttgggagagtctgcttgaccgggtttaagtgattttcccagactttagccgggggaggatggttggccctatgcagtgggggaggtagtgttgttcgttggaagaaaaccaggatgctgtcatataaggaagaggagatgcgattatgggtagggaagaacacaagatgtccatttcagtgtccctatgtaaaaactagcgttttaataaacaaatgtgaatattttattaaaataagtatctttacgtagattgtcacttgacaaaaccgtaagcgttcaaattcagatgagaagaaaggaaggaaagaaggagggaagaaagggacagccaaaagtcaactctttaatgagtagattatgaaacagaatttcgtaaatgcttgataatagtgaggcttcaatgacatgacataaacatttctctcctgcctatgagcctctatgggaatgattgcagtggtattctttgagcttaaagaaaatcttccttcacaaacaaagcacaacacagcacagcagaataaaaatgcccctacactttcagtaacaagcctaactctgcagtggagtggaagataatgggtagccgctcctcagtcttccccctcagtctccctttgggatgatgtttatatattcacagatcttatatcaggcctaatctcatgtgcaatctcatcttttacacttcaccatgcaaaggatgagtctgttggtttcctctgggctcttggtgtgtgctggaaatcaaactttacacttgatgttcgtcttttttaaaagattaggatttgaactgacataaattaatttttcagtcaagttcatgcaaacgtttataattattaatggaagttaagtatatgttaaaaaaaagtacttcctttgtgcttgcaaacagaaaaatcatgggtctggtataaaatgtacacaaagttttgttccatgagataagagcaattatttctccatggcacttaaagcatttctgtcaatcctgccgcccttgctttggctccagtcccagtgccttctgaaagggggaaaaaacctaactttgaaatccacagctgtgacctcaggcctctttcttttttaactagcatttcttcttttcaatattttttaccctaaaggcaaaaacctaaagaaaatgtgtatgttatgtttaaccaagatctccttttgatgactgtgagggtatttatgcttctataggcaatagatgtggtctgttgctaaaaggtaataatgatattgtttttggctagcagttataatgggaatgtagacagttgaatcatttgtaaattaatgaaagagtagagtattgatggatttggtcgttgcatttgcttcaacagttttacactttgttttcttgagcaattgaatggaagccgatgccactcttggttctagaacaccatccagattacctgaacatgctccacgttgccctcattttctactggagatttggaagccaaatcttagtctattgactaagagatgttgagggctataaactcagatgacatttaaagaatagtagcatggatagaaaatttagtaatttttaacctaggaatcctgaatgttgtttgctgttttgagatgtcaacacacctggagtgctaatggaatcaatgattctcttggaatttcctagattgaagcctccatcctatttgtacttttccacttgatggttccccagacagctttctttcagcagctcattcatgcaaaaacttgggcgatgacatttactagtccactgacttgattttactcagaaacttgcatatatttttaatatttaaaaattcttacttttaattttcttccataagtaataagaacctatctattaataaattttcttctcaagttgatgactaagcaaaatagtaacagttttctgttcatccaaatgttaggttcagcaccttcctcttccatttgaaaaaagttattcttatgataaatttatgctttctcattagccagagaaatgtaaactctttcttccattcatgtcacattgagaacaggaagctaatgtttttattcagcatggctagcattctctacttagagatagtaaaggacaaatagaaagaaaatctattcttaagattgtgtctttcagtgcttactgatttcagatgctttcatctgatttcatactgatttcagtttgtggagcagtaaattcttcattcatctagctcaatgaagggtgacttctttttttttttgagatggagtctctctctgtctcgtccaggctggagtgcagtagcctgatctcagctccctgcagtctccgcctcctggattcaattaattctcctgtctcagcctcctgagtagctgggactacaggcgtgtgccaccacacctggctaattctgtatttttagtagagatggggtttcaccgtgttggtcaggctggtctcaaactcctgacctcaggtgatccacccgtcttggcctcccaaagtgctgggattacaggcatgagccaccctgcctggccgagggtgacttcttaatatgaatcatctttcaaagaaacagtgcatttcatctggggtcagagattgtccttcatcagtatgtgaacttgggcaagtgctttagttgcaccttggttcctttatctataaaattggaatagcaatgtatgtttcgaagattaagtgagcttttaagctgaatcattacatgaagtaggggaaagggaacaaatatttattgactccctattataatgcattatattcatgatatccattatcctatttaaagttgtcatctctcctttgcaaaaagtattgccatcaccttttctaaaaataaagaaactcaggttttggaagaaacaataacctgctcaaggttattagctaagtggtagaaccaagaatgaaactaacagccaaaccccatgttataccccatgcctatgtaggagaatgtttgtttcttttctgtacactctgttttttaaaatgagaaagagagactgggcttaaaagtggataaaaaaggctaacttttccatgaagtattaacttttcttttctaacaaactaatttagagagtatgtaataaaaacgttcttagcttttttgaaatactggaacatttgtgtagtgttccagaaatgtgttttgaagtttgaatgacctacacaaaaagtaacacaaaaatgagtacatttttgtaaactgtcagaaaagataaaacattctgggctgattcatgaccatgtgctttgtatctttctgacaggtataaatcagctatccttgaaaactggatccaagtttataaaacataattattttacttggtcttgaatgcctttacaatcattttctcaaatgtttttaaatgaatatcttattaccataatatatccgtaatagccctctcaaattatcatataatcaaaaatattgaattaccaaagtgaaaaacctaaggacaaacaacaggtctcagtagagtagattatagaagctcacatgtttcaaggagaaaaatttatccttgtaacataatgaaagcattttacaaaattagcttcaattattaaactaggctagagtattacattctaacacttggtcttagttctttgtcataaggtcactactgtttgacaaatggatatcccttgggtaagaaacaaatgcctttagttttgtgttatcttgcaaactgatcagttcattagtgaggttgtaaaaaataatatatattatggccaggcgtggtggcttatgcctgtaatcccagcactttgggaggccgaggcgggtggatcctgaggtcaggagttcaagaccagcctggccaagatggtgaaaccccgtctctactaaaaattcaagaaaattagccgggcgtggtggcacgtgcctgtaatcccagctactcaggaggctgaggcagagaattgtttgaacccaagaggcagaggttgtagtgagctgagatcgtgccactgcactccagcctgggcaacagagcgagactccctctcaaaaagcatatgtatatatattatatattttgaggctgatgaagtcttttgtgtgtatttttattatactactttgactttctgatttaacaaatagaagcttaaatgttacaatgtttacatcatttttgttcttccttttcagtggctccacccacaaggttaagatataatgtaatatctcatgacagtatacagatttcatggaaggctccaagagggaaatttggtggttacaaacttcttgtgactccaacttcaggtaaaaacaattgactttgttttgtagagcattagcaacttttcatgcataggcaactaaaaacatgtagtgccaagcattgtgttaggattttttggaagcttttggtttgtttaatcttcagtgtttaaaatcttaccctctaatcaaggtaataatgttccccaaagagtaaagaatgactcttggctccagttctttttagaccaaataatcagacaatcaacaagttttattttctctgtttagtcataaaatgaatactttgaattcattggaacttaaatatacaatgcacctgaatgtccaatagttttgactagttgaataaactattattaattaactcaatagaataatattcagcattatacattgaaattagaaaggctaagtggacattgtgaaaataagtgataaggcaggaaaaacataagttgaacacattttttgatcatgaatagttatttaaggatgctttaaattaagcatctttattttaaagatgatacttaaatgatgcttaaagatactttattatttaaagaagctttaaattaagtgtctttaaataatgaagtatctttcaacatcatttggttgaatttttctttctcatattttatgtttttattatatgaatataataagctaaaataatacagaccatatagggaaattgcctctgctacatggttgttatgaagatgaagatgggatcaacaactggattgcttgaattcaaaactcgattctgtcacttataagtagtgtgattcaggcaagttaatgactcagtgcctcaagtttcttctatacaatgagcaaacaatatttgtacccaccccatggagttttctatgaatttgcaactcaaggttgatctgggatcagcagcattggcattacctgagagcttgttagaaatgcagaatactgggctctacccttgacctcttcaaccagcgtctgaattttaaaaagatccccaggtgattcctatgcacattaaatttgggaagtactggttgtgaagactaaaataaatataaagcccttagaacagtggtgccatatagtaagtgctcagtaaatgttacctatgattgtcataaagatgctctcaggtcccattagttctccaaggatccattttcacacagtacataataagtacttaataatacatatttgtataatatatatttatgtaaacataattattttttctttttattggtgataaagagggttatatggagctacaagcctttcagtggtagacctttttccaaaagatacagtgaaggagacagatgctgtattgttcattaatgtggacgtcttactcaacagttgacgtaaacattcaaacaagacaagcagatgaaacacctggtttcttgcttggtcaccaaaaggccaaatcttttatttattttttaattttttaaattttttgagactgagtttcgctctttgttgcccaggctggagtgcagaggtgcaatctcggctcactgcaacctctgccttctaggttcaagtggttttccgctctcagccccctgagtagctgggattacaggtgcccgccaccatgcctggctaatttttatatgtttagtagagatgggatttcaccatgttggccagactagtcttgaactcctgacctcaggtgatccacctgcctcagcctcccaaagtgctgggattacaggtgtgagctatcacgcccagcctgatatatctttcattaagaaatattatccgtagactcattagaatgacttctggttgagcaataccagatgtccacttttcccatggtggcgtacagaagtgacttgcttatggaaaacaatatttgcaaaccttgttcagagttttcattttggagtatgactcagttatgaaatttctttgatttttaaaaatatagcttatttttttaaaaataagctatcatgggaaatttaaatttaaaagattcttgaagatttatgattctaaaggtcaaaatacaagttactattttttgttacctctgagaatccctcatgtctgatctggaaaggtaattttttttccttcaagtgattggtagcttaactttttttgattaattgctgataataccaaactattaagtacccccaagcaagtgttactgaggaatcacagaattgtagaagtgacttgggtagcctctgaaacaaaccttcatctgaatgcttcaatcctctcttgaagagtgcacccaagaagtagatgtctagttcttgcttagacatctcccatgataaaataaaaattgggaatgaaagcaaattatttcttcataaatgctaggtttattttccacagtgttcttaccgcagcaacccaagacaatcagtcttgacaatctggtatctatttgattaaacatagtaaataaagagtaataaatacatttagctgcaaaatgtttatagctgtttcaacactatgagatatggtccaactattgtttctgccagcctttctgaaagcatgttccatggtattctgtaggatgctaatagctattatatagctaaatagtttaatggtcaaataaatttgggaaatgctggtttaaacagagtttaaagctttttttgtttgtttgtttgtttcaggaatctcaaagcctttaataaaataatacactccataactctcaaagagggactctaatatacagggtttgttttttgagaaacttttttttagtgaaacacacattgtgaaagatatattaggtgcactttgtagtagatgagttttaaatgacagaagttcctaaaaccagatttaacatcttgaacataaacgcacataaggaaatgggttttggcaagagaaagactccattttgccctccagtagcaggcagcccagataatagcagcatcaaatttcagatttaaaaatattaattttattggcatatgattaaattataatctgtattatgtttgattaattcagcaaatttcagtcttctcttgctggtactgctagagagacagaagttttaaattaattttccttttctcagacacataattgcaggcaaaaattagagaagaaaagtaaaatttggaattctgcataaaagttgagtatttatcatcagcactttcaagaaagccttagatgtcagtgtaacctgatggagaggtaatgggattttgaaatcttttcatgaaccaagccaacttttaagtagccagtcaatgagtgattccttcagcatcctcagccatttgtggtcagatttaagataattaaattgctcatgtttcaaggatgctttgactcactttagagaggctgtagaaaaaaattccagtgtaaataattaccttcggcctgcccatatctccccttcacattttttttttgaggcggagtctcggtctgtcacccaggctggagtgcagtggcgcaatatcggctcaactgcaacctctgcctcctgggttcaaacgattgtcctgccgcagcctcctgagtagctgggactacagacaaacaccaccacggctggttaattttgtgtgtttttagtagagacggggtttcaccacattggccaggctggtttcaaacccctgacctgaggtgatctgcctgcctcggcctcctaaagtgcaaggattacaggcgtgagcctcctcacctggcctcccccttcacttttaagtggaattctttccttgaagagtatatctgatgttgagggcttgctgtcctgtaatcttgtactatggcttttcctgctatataaaagcagtagtgtgttatgatgaaatatttttgtgaatttggttttctctaatttcgacaattgttagttatctaatgtaaaaagggtacagctaaaaaggaagatggaaactattttataattaggtgcaatacacatatataccattgtatgtatttttaaatgtcttcacctcttgatgtatgtaaaaaaatcatgatgtacactctaaatatatacactttaaaatatatacaataaaacacatttcaaaaaatgcctttactgtttaacaccataattgctaactaataaagtttcttaatgtacacagtggaccttatttcttagaactgatttatttttctcttttattataggtggaaaaactaaccagctgaatctgcagaacactgcaactaaagcaattattcaaggccttatgccagaccagaattacacagttcaaattattgcatacaataaagataaagaaagcaagccagctcaaggccaattcagaagtacgtatttacagttctcaaagcacctccgcaggactctgtcccagccttggatttgagtctgtgatatatattctacaacttaaaattctagatttttcagatttatagagatcctagaagaccttcagtcttaccttcaacgaattcctctgatctctaatactttgctacccttccctttcccccattttgctatattcttacttatcctttatgctttagtttccaatgaacttcttaacattggctcctgaaccttacccagacatctctcctatgtgatttcttagcatctagagcttcccttctggtactataacaccatattgtaattgcttatttacttctctgtgacccctagaagcctgcaagttttgcaaagactgtaactcaatgatttttatttctcattgtatcacagttgcatattacaggcctggcatataatgggcgctccatgaatatgaatgtctgaatggataatgcctgcatctcctctgtaggatccccagaaggcgccagtccaggctctactaaaacagcctatgcaacagggaatttaattctttccaattgttaatcagttgacacagggactgttctatgccagtctccatgataagctgatttgtcaacaaatacaatgtgataagtattggagagagtacatataggactctgtgaagagaggtactctctctgcccgagtaatgggctgtggagaggataggcatgggaaagcttcatgtttgagccagttctcaaatagtaaattgggcatttggagaaaggatagggtgtgcagaggacattctaagagggagtgaaagctctgcgatggtccaatcaatgtccacacagttccttaggaagcatttccttagattgagtttaaaaatggtccacacaggctgggtgcgttgactcatgcctgtaatcccagcactttgggaggccgaggcgggcggatcacctgaggtcaggagttcgagaccagcctgaccaacatggagaaaccctgtctctactaaaaatacaaaattagccgggcgtggtggcacacacctgtaatcccagctacttgggaggctgaggcaggagaatcgcttgaacccagaaggtggaggttgcagtgagccgagattgcgccatcgccctccagcctgggcaacaagagcaaaactccatctgaaaaacaaaaaataaaataaaaaataaagatccacacaggccctgattcttctgtctctcaggagacattcattcattcttttttttttctgttgaacaaatgtacgccacatgcctactaagtgccagactgttttctaggcacttgggcacatgacaaatccctgcccctatgaatcttatagtctagtgaccagagactacagcaacatcctcttcctgaaagcagtgtttcaaatgtgaaggataaaaattttgtattgtgaatgcaaacagaagagacctagcctagttaactttctgttacttcattgctaaaacagactcttttaaaaaacccaatttattattaaggacaatttaaagcataataaaaaatcatcagaatagtataatgaacccctaagtagccatcatctggcttcagcaattagctgctcagggccagtcttatatcttctatctttcaaaccctttgccttattattttttgaggaaatcacagacatcatttcaagtagatttttttctaaattttaaacaatagcttttaaaatcctaccataagatgaatccataaatctgtgaggtggtgggtatggaactttttgtgcagcaatgttctatctagattttttacaccccttccctcccttttttctcttcctcttgttggtaatattttgtgagacttataggctggtgcaaaagtaattgcagtttttgcaattactttaaattggaaaaatcgcaattacttttgcaccaacccaatattttgtgaatattttaaaaatttaaaagaaaacacaacttggttaagttacctcttgaaacttctgaacaaagacatttggcaaattcacctgtcagcaggacatacacatgttgtaaatgttacattcttttgagattcactttgtctgggagctttggaaaaggtttttatgttaattttggtttaaatcagccttctgtctcattttactggcactgcactttagtttctggcctccaacattcctgcatgagttgctgaaataacttcacttacagtttgtgagaagcagtaaaagggataaggagaaaagattcatctttctctagtctgaggttttgcaattgattatttcaaacattccactgattgaacaggggaagaaacacagagagtcatataaatcttcccaggctacttcttcaaaacacataaaaggaaattcatttgtttccatcttgcttaactctgctaagatagctgtagagaaacaatataacttttagccagataaataatatgcaagcgtgtatgtttttagctgtgttatttttattggcaggatagagggatttgttctgcccaaatagcagtttgtaagaataaaatgaaaattgcttggatagctttcttttcccttttgcatttcatttatattcttgctctctgtgagacagagctaaagcctagtctcctcttcctagaaaactttcgtggttggatccaggaaagtggtgatcaagataaagccttgtggctataggtttgcatttagtgcagggatttgcattctttatgagttcatattttgatacacagtaaaacataagaaatgatgtttgaatttttaagacagaaaggaatatctgatctaataggtattatgattccaaatttgccacaagcagctcaaccacttccagcctcagtttcttcacctgcaaatgagggtgatgatatgcctattactgtgcagatgagcttacttcaccacgtagtacagcatggtagctattgttgtcgtaagaaataccattttgcttgtaacaatctattttccaactgattttgcccctacatgaggaagacatatatatcttatatgtgacatagtggatcagcttccataatgtctgttattttttcttgtttatttatagactgcttttatagctctgtgttttaatttaggacctttaaatatggagggcacctcttcaacgattaggagagacacaagatggaaataaaggttttattacttacaggtcctgggagttacatggtatgcctggaggccacacccatggaggtcagggagcacatgaagtgggggcacccataagccaaggtctttaatggggtccagggcattatccctgggtttctctgaggagagttttaattgggggatttgaagtaagcaggcatgagttccaggaggtcacactgtgactgagaggtggtcattgtggcatatctgcatagtccctgcagagaatgagggtcagtggggccagtcaggtgggctgtgtgcagctctcccatagagaagtagaaggtagaaatagatctaggagagaataatgaataataagagtaactcccgagtagagactggcagaaactcctctggaaaggtgacatttgaactagactttgaaagatgggcagggagcagttgtttaaggcagatatctggattaaccacatttaggaactagtgctttagggtatgttgtaggactggaaactgtgtcaagggtgactgagcctgtttctagtatgagtaagtccaacttatatttaaaatggatgctgaggcaacataaaatttataagaattcaccacattctatgttggaaaattttttctcttttaaatgtgtcttgtcaatctttgcctgcaaattcctgcctttctttggaagtctgactcaaaacggaagtttctctaagtctctacctctgaatttattactagtctttcccagagctatttctacctccagcatcactcagcacaatctttctcatattaaagtggcagacatattttgttttagaaaatgcaagtaatttggggtgacagcccatgtgtgggtggggttgaagatacagatttggaaattatctatgaaaagatgagaattttaattgtgagatggtaaaattacaggagggtgtagagagacacaaggcaaccttagtatatgattgtgtttcgtgaatagtaatagagaaagagcccaaagaatgcgaatgaaacggagtggtcaaaaggagaaaaccaggataaagccattctaacaactgagaaagaaaagaatttaagtgtgtgtgtgtgtgtgtgtgtgtgtgtgtgtgtgtgtgtgtgtgtggtggtgatgatggtggtggtgggggtgctccaaagtgccaatgcttatcaagaagtcggtgaatgaggttttaaaaaattgttataaaaatttatacatatcaggatcaaggtatcttacatttttatttttaaaatcttttaaaattttgttttatatcctggaatttaatctctgggtagcagaaagccaaggaaggtttctaagaaaaggaataatagaattggagtgacatgaccttggcaaatgacagatctcaaaccatttcagcaaagggatggaagacagtggaaagaaaggggaggaggatgtgataaagacaggatgaatggaacaatatcctggagaaggcagcaagggtggttcagaggaaatcattgtttcccctatgtagcttaccctttaatacatttgctgatttccatgaaatgaatgtagcaattaattgaaataccttggctcacttctgcattttcacagggtgttttatttgtgcagagaccactgacatttggcaggctcttgactgcttcaaacagcctgaggtgctatttggcagaaaagcagctgtgcagttttaaggagagaatgcagtggaaagttaagctaatggtgtaggttgatatgaatttattaaaaggccaaggggcattttttggtccttgaacattttctaattaaagccataaaaaactaccatgtattaatagagacctttttttaagtttgaaaaggaattattataaggctcttcatcttcttgttttgctgttggagcaattccaaatgaggctattcatggttaagatctttctagaatggggaccaagctcatcggctaagtccagagacttgaagatctggctttaaccccatgccagcacttaactggttttatgagataggtgttagctttctggttcttcattccctcatgtataagctagggataattatgctgattttacagcagttatgaaggattaaatatatgtgacacatctgcccatagtgcatactcagccaaagtaattccttaagtgtttctgtgtcttttcatgtcaaagttgagaaaaaacaaaacaaaacagcagttctaatatttggggatgagtttgtaccacggagctcatttctatagatacttttagggctttcaagggttttagtaaaactcactgaatattttcttttagattttagtataacatggtgctgtatctctacttttcttccagttaaagatttagaaaaaagaaaggatccaaagcccagagtcaaagttgtggacagaggaaatgggagtagaccatcttcaccagaaggtcagagacgattttaattaactcatattgggagttgggttgttttaattacacaggcaatactcacatgtggggttgctggtcccatctaagaagggcaggtctaatacgaagatcgcctgtggcctctttgtactcttccttcctttcccacacaagatgacccccaaccacttggcacgtgacctttcaggcacctttctcagaatggtgcatatatgtacagcctgtcatatttcttgttctgtgcataccttttcacttggaaacctttacatgccaattcatataggaggcaggatcacccagtgtaaattgcatgggctctcccacttgcctgcctaaattcaaagcctgcctttaccactttgagtgatcttatactagttatccgaatgtctatgtctctatttccttatctgcaaaatgtggagaatgggattcagatcacagagttctttgggataaaatgcgttgatatgtgtaaaatacttagaactttgcctgccattgaataatgttaggtattattgttagtctacctcattctttttaatagccagatagtgttctatgggatagactattataatttattgattagtccccccaaccccgttttttttgaggcaggatctcactctgtcacccaggctagaatttagtgtcacaatctcggctcactgcaacctccgcctcctgggttcaaacgattctcctccctcagcctcctgagtagctgggattacaggtgcgtgccaccatgcccagctaatttttgtatttttagtagagacagggttttgccatgttgtccaggctggtctcgaactcctgacctcaggtgatccaccttcctctacctcccaaggtgctgggattacaggcgtgagccactgcaccctgccgattattccccttttgatgggcatttaatgttgtctaattttcactatcacaaacatgctgtaacaacgtatttctaactgtggaactgcaaggttaaaggataagcaaattttagattgccaaattgatagatggcaggctctatcaatatcgacttaaatttttttcagtaatttgtacttctgttaacgatatgtaacaggaattatttcatatgttcttttcaacatttgaaatccttaatattgaaaaaattctccaattatatatcatttgtttaatttacatctttttgattactagtgaggttgaacattttttcatatctttagtagtcatttgtaatttttcctgtttatttttgttttgtgttgtctttatttctttaatgaacacataaaaactttctaaatattttgagtatgaaacccttttctacatattgttgtatttttgcaaatattttctcctggtgtataatttgccttgcaactttattcatctttttgataatttttaatacaattaaaaaattcttgaaaaatgttttactctgaattttgatgcatttcttggttttctaatattttaatatgaaacattttcatacttttcttctaatgatgtataggtttatatttatatttattacaacttattaaatatgttagatataaaatgtataaaaataatgtcatagacatgtttgtccagattaagaaaataaacctattaccatacagttaaaactcattgcttattcctataaattccccttcctgtcttgtaggaggctgccactaagctgaagtcagtttttatcattccaatatgtctttatcattttacttcatatatatttgccagcttaaaacatatttaattatacaaagttcaaattttatatatctttgcttatgtctccttctgtacaagtcgtagaatttttctagagcatataccttggagtcaagttatttagttgctgcatgtgtatatttttatagctcctcttgatatctttttgtgtttttatatctaatacttacttcattgtattttcttttttctaacatccagagttgagtgtttatcccttaatttttaatttttcttttctattatatgcattttaaaatatccaagtactgcttgagctgtctcacatagattttgatatgtagtattgttatgctgtagttcatactattttctacatttcactaggttttcttccttgatccatgagttacttagaaatatgctattaatttctaaacatctggagattttagaagaagatatttatttattattgatgtctaattattgcattgtgggtagagaatggggtctgtaggaatattctttgaaatttgttgaggtattttattacttaaatgtggtcagtttttaaaaccattccatgtgtccttgagaaaaatgtgcattttaatttccctcgatggtattagtccatttctatttgtaactctggcaattttgttttaaatacctaaaggctagatacataaaaataagaattattgtatttttctagtcaatttttctttttgatattttgtaatgattctttttattcttagtaattcaatattcacctcaaggactattttatctaatattaatatagctataccacctttattttatttagtactcacataatgcattgattctctattctttaactttcactctctttgtgtctcaagttcaaggtgagtaatttgtaaagaagatttatttgcattaaaaaaattctcttacagtcattgtgttttacttgatagctttggtttacttaaatgtgttgatgttactgataattttggacttactatttattttgtgctattaccctacatttttcttatcttttttccccctttacaccttacttaaaattgaccaagtttcttttttctttaaatccattttagcacttactgacctggaaaagctaacatagtctaatactaatcaatatctttactatttccctataatacagaatatagaatttaataatgctttaaattcaatgattaatgtcccatcttacacatcattcttgacaaatacattaacttattttttgcctcacaaatatattattgaatatatttattatagatattctttaacaatcagtgtttgtccagatttgcccacgaagttattttgctcaccatttcatcttgcatctcagaccttctctgtgtatccacttcccttcacagaagatctgtggtggtaaacttatctttattcatgcaaaaatatctttactctgcagtcactattgagagattagctgggtaccagattaagagttgtctctaatcatttcaaagacattttactaccttctggctcctgttgctttgttgacatgtgtgttttcagtctaaaggttgttccttggtaggtgacctctcttttctctctggttgcgtttcaggcttgctgtcttttatctttggggttctgctgcttcactgtcatcagcccagatgtagatttctttgtgcttccagatttcagatttatatctttcaccaggattagaaaattcttaacctttaactctttaaatattatttttctcagcaacttatattcatattctttatctcaattagatttatgacagtttcttttgacaatctatgtcttttaatagtaatattttgtacctctctgattttacaaataatattttgggttccttatatctgtcttttaggacactagatctcttcccctttctaatctagcctgttcttttcaatggggaaatcttttagtcctagaaattacatttgcttctttttcaaggttgctagaattttttatggtgcttggttcctttttaactttttaatcattttgatattttaatcatgatcattttatattctgaattcaataattctattattaaagtattttagggttaaattcttttgtttgtttgtttgtttgtttgagatggagtctctctctgttgcccagacaggagtgcagtagtgcaatcttggctcactgcaacttatgcgtcctgggttctaatgagtctcctgcctcagcctcctgagtagctgggattataggtacccaccatcatgcccagctaatttttgtatttttagtagacatggggtttcaccatgttggccaggctggtcttgaactcatgacctcaggtgatctacctgcctctgtctcccaaagtgctgggattacaggcatgagccaccgcagccggttagggttaaattctcgttgcttgtttatactgactttcattcatggggctggtttcttaggatgatgtgtcactttggcttgtggactcatgtggaaattgttcacagcatgtcttaagggtgtgctccttcagaagggcacattttggttgctactaacctggaaatcctctatgttaatttcttgtcttaagatactcagggcttggttacaaattcacaggacagacagttttccccccacacagagcttaggccaatgtacaactttccttgtcatctcccttgctagaaagcagttatttttctagtccagcaatttgtaaggatatagccctgtgagggtgcctcccttacataagaactatcaaatacaacttcccaccttgaatgcattaaggtcttgtctcccgttccagcatgactattacagcttaatgtcttgattgataaatttctggttaaggtgaaatctaccagatatatattttcccttgcagtaagtaagtagcttatgatgagatattttgagacatgtaaatattctgtttcttattaaaatttcacctacttgttttagtgtctactgattcttgcctgagtcagtaactattatgatgtttctcaaatggtaatttttctaactccatttttcattctacatttattatttggcattctactgtaaagaagctttctcccttctcccacatttgtttttcttttcatatgagtatggactggtggattcttagtttatttgagtggattataatccattactatcattatttattatgatgctcaaattgttccagatttgctaggcgggaactatttcatgctgtctcttatgtcttttaaatatgttcccatcatcccttaagttatttcttactttctggcacaaactttacattctgagcgcttgtattttttctacctggccctaaaatgaaccatttcttccaggagtcctggcttctttttgtggagaatagtattttgaaaccaaaatatgggtactagctgtgcctattgcttctggagtgtcataccattatctctctgtctgtctctcattctctcattctcttgctctctagcaatcaatcatctatctatctatctatctatcatttatcatctatcaatcatctgttatctatcatccatctatcatctttgtattatctgtctctatctatctatctatctatctatctatctatctatctatctatctattttactgcatcttatatctatcttttgcccataccacagggtttattttagccctccttcttctaatatttataactcctctttcaagagagtgagaaacatggctcccaatattctaaatatatctactcatatggtcaatcatagaaatagttttagaactgctaatctgtgcatactgcaaaaagacaaacaaatctattaacgagttcaatgtttgcttttagtctaaggtatatcatatctgtgttcaaaaggatcttggattagttcttttcttgcctattcactgtggttttcttatttattttaatacagttaagttaatctgtgagtatgtaaaacattggcacatttccagaagttgaaaagtctacaaaaggatgacactgaaaaagaagtatcacatctgctattccttccatccagttttacttgcccctcctatataatcaaatgtgttagtttccgtcttatcctttgtatgttttctttttgtaaaaataggtttgttaatatttttaagggagaattttacaaggaagtttgtgggtttggattggcatttttttttttttgccacttgatgcttaaacaatggtgtttaaggtgaaatctgtggaagcctctgtggattagagtttggtgtcagaatttattagctatagctatgtattcctaaagtgtctcaactgctgtattctttcccctaacgcaccttcctctttcctttccaaaacctaggattgagtgaaacaaattaaaactaagaagtagacaacggaagagtgaggctactattggcaaatgttctaataaataccaatacacatttggagaaggaagattcataagcagtccatttccttcctcactggagatatgtttgaacatatgtttacggaggagttctttctgagcccactttcaggcaggcactatctcaaagggtttattgtagtgatgagaacttggggtagggcaagaactttcaggaggtttatggaaaataggtgtcttcctctttcagatgagggtttccatgaggtgtgtgccagggcagtgaggactttgtgagagcgctggttatgtgagagaattgtcttaagaagtaagttataaacaatggtgacaatccaggacagagttacggctcctaggaggtggaggggcatgcactagtgtggcccactggagacaaaagatgcccctgctccaccccaaccaggtcgtttatgcaacccttagcataagcccctcctccaagtcgtggtactctcgtgatccacatttaactatactgctctttgttttccctgaaatctacaattttcttgtataagagtctacactgatagtggctgagatacaatcagacgtattatacatattttacaattttagtttaaacgcagagttaagatccttaacagaagtggctgtgcagttaaagttacagttaagattgtttccaatctactgtacatgtttctttaataatgcaaaatgaactcacaaacaaaaatggtacttgcctttgagcataatattggcacatttgcattaatggctatttctctatcgttgtccaaacagctttctttaatcatttttggagttttgcacaagaatgcagaacctgattggaaataattaagagactgataggaaaaacagcatagggcttttttttccttctttttcagtgatttttaaaattaagatcaccagccttctttgttttgtttttaatggattttttaaaatactgtagtctctacggtgatataaggggtgactctcagtgttctcattttctgggggaaaaatgagatgagcttaaattattctttccagaagtcagcaaactatggcccatgggcgaaattcagtcttctattttttaaaataaggttttattggaacacagctatgctcattcctttacatattgtctatggctgccgtcccacaatatcagagttgagtatttgcaacagagatcatatggcctgcaaagactaaaatattttctgttttgcttttttcagaaaaagtttgcttatctttgtcttagaatgtttaaaatttttgaatgtgttggcacacaatccttcactaaaccaagtaatgaaatgcttttccgaggacaactgttctattttgctatttcataattgcataggctgtactcataaaaaaatacatatatacacatacctacctttgaacatttctacctcttatactcccatatttgattcttttttacttgaaacatgagaactctcaggagttagttgtgaagattgagttaaaatgtgtaaaatacctagtatatagtaagtgccacatattttatatatagcacttactacatgcgtaaaatagtttaaatacatatataaatagcataatatttgctgttaataatagcatgtatattttgcaagagctaagattatcatgggccaatggtttatattattgatttaataatgaatacatagaagagctggtaattatcacctagtgtcaagcactgaattagtttctggggattaagtggtgagcatgggaggcagaattctaccctcatggagcttacataatctagcagggctcaacacatgtgctcaatgccttctcttggagaagggccagttctgaattatgcagtcattatggttgagtgtagcctgggcacatgagtatttttgaggtatattttcacttactgggatctctcacctcccattaatacttttatggttcttggctcacagtcaagagattgatttgaaattttaacacctttccactagctattgtgggacttagatctggcaaacccaggactgtgagttcaacatggtaaaaatgggactgttagggttttaatttccattaggtaggcgtcaggaggtagctaaagtacagggaactagatgggtcttgtaggttaatgctggcaagagcctgactccactccaagattaaaggggaaggagttgggttcagtcataaacaggacattggggttaagtgtgggctagaatttatgcattaaggggtttgaaggatacctggatcatagagtatgctctattagtgcttcttcctcttcttctttcccagttttctcctcctccctttccttttcttcctcccactttctcctccttattctcattgttattataattattattatctagatagttgacatggtgttccagcaacaacatcaaggtgaactagaaaattgctccttatccatgcagggaggccctgaggaagccactctgtatatgtctgtgccctgagtgagggaaaagtcttgagaatgcataaccttgggcctgtgccacacacagcttaggtattcaaatttacattcaccatgtgctctgaggcctgcccactcaagaaattaatataaaaatgccctgcagctggtaaaatcagtggaatgactggcagaagcaaacacaaaatcacatttgagccaaggcctgatgaaacaaggccaaaggagagtttgcaattcacaatttcaaaacatagaagtaaactatttgccataagtgtcagaagacacaaaagtggtggcctcagaattctatgaactttaattatggaatcattacataaagactatatagtaagggcctagtgcagtgactcatgcctgtaatcccagcactttggaaggctgaggagggtggatcacttgaggccacgagttcaagaccagcctggccaacaaggcgaaacctcgcttctggtaaaaatacaaaaattagccgggagtggtggcgcacatcagtaatctcagctactctggaggctgaggcaggagaattgcttgaacctgggaggtggaagttgcagtgagctgagatcgtgccactgcactccagtctgggtgacagagcgagactttgcctgcttcaaaaaaaaaaaaaaaaaaaagactgtatacatataaaaagactatatatatatatatatacatacacactatatatatagactatatataaataacaatatgattactaatctcagaaatatttgaaagaagagatgaaaagaatgaaaaaccatgataaggaaaataggtagattagaaaagggaccaaatgaacataaagagttctgaagagcataaacataaaagatagccacatccataatcatgttggtaaaactgtaggacactaaaatttcaaaagataaatggggaacacataggaagaaaagagccaaataagaagaaaaggacttattgaacccatttctaaatgatggagatctcactgtgcatgcagttatttgttcttcagttctctggagtattaaataaaacctgtttttttttttgtttgtttgtttttaatttaatttaagttctgggatacatgtgcagaacgtgcagttttgttacgtaggtatacacgtggcatggtggtttgctgcacccatcatctgcattaggtatttctcctaatgctatccctcccctagcctcccatcctctgacaggccctggtgtgtgatgttccccttcctatgtccatgtgttctcattgttcaactcccacttatgagtgagaacatgcagtatgtgtttttctgttcctgtgttagtttgctgagaatgatgatttccagcttcatccatgtccctgcaaaggacatgaactcattcttttttatggctgcatagtgttccatggtgtatatgtgccacattttctttatccagtcaatcattgataggaatttgggttggttccaagtctttgctattgtgaacagtgctgcaataaacatacgtgtgcatgtgtctttatagtggaatgatttataatgctttgggtatatacccagtagtaggattgctgggtcaaatggtatttctagttctagatccttgaggaaatgccacactgtcttccacaatggttgaactaatttacactcccacccacagtgtaaaagtgttgctatttctccacatcctctctagcatctgttgtttcctgactttttaatagattgccattctaactggcattagatgatatctcattgtggttttgatttgagtttctctaatgaccaatgatgatgagcttttttttcatgtttgttgcctgcataaatatattcttttcaaaagtgtctgtttatatccttctcccactttttgatggttttttttttgtaaatttgtttaagttccttgtagattctggacattagccctttgtcagatggatagatggcaaaatttttctcccattcagtaggttgcctgttgcctgttcactctgatgatagtttcttttgctgtggagaagctctttagtttaattagatcccatttgtcaattttggcttttgttgccattgcttttggtgttttagtcatgaagtctttgcccatgcctatgtcctgaatggtattggaatttctggccagggcaatcatgcaagagaaagaaataaagggtattcaactaggaaaagaggaagtcaaattgtctgtgtttgcagatgacatgattatttatttggaaaaccccattatctcagcccaaaatctccttaagctgataagcaacttcaacaaagtctcaagatacaaaattaatgtgcaaaaatcacaagcattcctatacaccaataacagacaaacagagaaccaaatcatgagtgaattcccattcacaattgctacaaagagaataaaatacttaggaatacaacttacaagggatgtgaaggatctcttcaaggagaactacaaattaccgctcaaggaaataagagaggacacaagcaaatggaaaaacattccatgctcatggataggaagaatcaatattgtgaaaatggtgatactgcccaaagtaatttatagattcaatgccatcccatcaagctaccattagaattagaaaaaactacttcaccatattagaaaaaactactttacatttcatatggaaccaaaaaaaagcctgtatagccaagacaattctaagcaaaatgaacaaagctgaaggcatcacgctacctgacttcaaactatactacaagtctacattaaccaaaagagcttggtactggtaccaaaacagatatatagaacaatggaacagaagcgagtcttcataaataaagccacacatcgacaaccatctgaactttgacaaacctgacaaaaacaagcaatggggaaaggatttcctatttaatggtgttgggaaaactggctagccatatgcagaaaactgaaactggaccccttccttacaccttatacaaaaattaactcaagatgggttaaagacttaaacataagacctgaaaccataaaaacactagaaaaaaacctaggcaaaacctctgtttttaaaaagtgatattaattgacttagttgaaaccatgacaatgaagataagacatgatttctctccactgggaatactactattctgtaacatattttaaatgttttcacttaaatgtaagaatccaactgatgttataaaatttggaattcccaccatttatttattggtcctcattagagctaattgaaatactgttttctttctcagagtctgtgtgggattcatttctcttctttttttagacttcatttctccttggtttaagatctacctttactgaaaaattctagacagcatattagtcaggaatccttggcttcagtagaaacacactctaactagtttaaggacagaaataattgtactggctcatgtaactgaagtatggctggacctagggtctcaatccagtatccgttgctctctcttgcttctccatctcctggctgtgccttcctctgggatggctttatttcttggtagggttcctacaatggcaatgaagtcccccccagagtttcaggttccagaattacataatagtgagcaaccccaatctcatatggtaggaagccttttttttttttttttttttttttgagacggagtctcggtctgtttcccaggctggcgtgcagtggcacaatatctgctcactgcagcctccacctcctgagttcaacagattctcctgctgcagcctcctgagtagctgggactacaggtgggccccaacatgcccagctcatttttgtatttttagtagagatgggtttccccatgttggccaggctgatctcgaactcatgacatgaagtgatccacctgcctcagcctcccaaagtgctgggattacaggcatgagctactgcatggtgggctatgaagccttttttaaggttagtttcagaaaacatctcaagaacagttttgattggtccagctcttgtgcccatctctgatccaattgcggtgaacaaggaaatgcaagaatctgactggccacaccaggagctgcaaggatggcattagccctaactgagatatctggattgagaatggaattgggcaaacacatttaagtcaactatggggagctttaaaatattttacaattctctttagattatctcccaaatgtgcactattaagatgaacttgtttctgccacatcatgaaaaaattgaagaatttttaaaaagtaaagtttcaatcatatggagcataatttgaccattaagaccacatttaaaatgatgccttaagttgctctgggtttcaggaagaaacaattttcttttacaaacaatgatgtaacacatacactctcaatgggagtgacatccttgaatgggcaaaaattgattttgggagtgaaaagtgaaaaatattaattattttatctgttaagtataagtatacaatacatacataaacagctatatggtatacctgtgattttaaaatttcatgaagaggtgattaggaaaaaatgtctaaaggcttcttatgggagtgataactaaaaatggttgagaaacattgatctaatgcaacacatgtattacagaaaggttctcctgcaattttagcccctttctcccctcacttctgctctctgagcattccataacattttctttttgaaacatagacccccccaaaaaatacaaaaattagccaggcatggtggcatgcacctgtagtcctagctacgcaggaggctaaggcaggagaattgcttgaacccgggaggcggaggttgcagtaagccgagatggcaccactgcactccagcctaggagacagaatgacactcctccccgtcacccccctccccgaaaagttatgcttatgcactcctgatgacaatcagatgaaattcttctagcgttagacctccagttttcctctagttcctcccttactgcccttgataagatagttttgaataattctgacacttttcctctggcctccagcaaagtttattattctcaacttgtgaattctccagtggtaagaaatcttaactctgtctgaaataagttttcaaatgtcttcattcttaaaataacttttaatatatcatttttaaaacaatcagataccttacagctatgaggactgatattgattttggcagagtgagtctcccgtaggaatgctcgggcttctcttacttgtaacttccttcttgtctaagaattttctattgagtatcttgtctccatacctgcagggctgactgttgtcaaattaagcgatgttttggcttcagaaattgcaaaatatcaggattggttcgttattaatgaattggagtaaccgggataattgagttgtgttttgtgaaaatcaccttaaatgaccaaagtaaacatacagccagatcatgtagtattatatacacagagctgaaaataaatgggaatataatacactggctcctgaagttgagcaaatttcattttaaaatagaggtgatcagataaaatagcctctcttgggtcaatattaacttaaggaaatcaggaaataactaggcaactctaccaataaaactttaaagcaaacttaattttttttatttttcttcgttttttttttttttttttgaggtggagtctcactctgtagcccaagctaaagtgcaatggcgtgatctcagctcactgcaaccttcgcccctggggctcaagtgattctcatgcctcagtctcccgagtagctaggactacaggcgtgtgacaccatgcctggataattttttgtattttagtacagacagggtttcaccatattgcccagggtggtctcaaactcctgagctcaggtgatccgcctgactcagcctcccaaaatgctgggattacgggcagaagccaccacgcccggcctaaagcaaactttatgtaaaaatatataaaaggatcacatattttcaaaggaattaaaatctgttttaggtatcttgtattgtggtagagtaggaagagtttggagagggtacattacaggagatgggggaataaaaattgagtcaaaagtttctgagatgttgttgggagaaagaagactaattgtattgggaggaagtgggagatatacatggacgggtcaagtggagagctttggaaagcacaatgaacagtttaggcttaatttggtaggtgaggaaggaagaaataatcttaaaatttaggtcactttgagagtcctgcagttcagccagtcacggggatggtagaggctcctgagccatttcttcaagggttgtcctgcatctgctgtcattaacagagattttagtatttcccaagacagtcatctttggacatcctgtctgtaattgagttgaaatctgtcactttacacactccttctgggcatatagaatcctcctaatcccttgtctatatgacagccctttacatatttgaagacagctgtcatgtcttctcccagtcccttccagtttagagcagaggagaaatgtgatgcatgtggtgtttacaggattgttagttattcttaagctgaaggtctctgagcgagtgctgaaatgttgtttcggctgtggcacaacaaccaggcttcatgttcctataaggtgtcatgatgttattcatcccaggtcgaatataggacaaatgcgtacggctttgatttcctgctatctttaattgcaaggcttgtccatattttctttcctttcttctttccttcttccttccctccctcccttcctttctccgaaatacttctcttctgtgatgggagttgaatggttcaggctctggagttagttctgggtttgaatttgaattcagcttttccacttgctcagtgtgtgatggtggacacgttatttaacctatttagttacttaaccattctttctctatgaaatgggaagaacatctacctcataggattaatactggacttagatgaaaatgatgtatgcagagcatctgatgaaagctatcactaagtggtaggcttttcataattattaatataaaaaaggaagcaaaggaaagtgtgtgtgtatgtgtgagatgtgtttgtggtgtgtgtgtggggggggaagagatttatttatttatttatttatttatttatttatttatttatttattttagacagagtcttgctctgtcgcccaggctggagtgcagtggtgtgatctttgctcaccgcaacctctgccttccagattcaagagatccttgtgcctcagcttcctgagtagctgggatcacaggtgtacatcactacacctggctaatttttgtatttttagtagagatggggtttcaccatagtggccaggctggtctcaaactgctggcctcaagtgacctgcccgcctccgcctcccaaagtgctgggattacaaaccactgtgcctggcttgagatattgatttaatataaggaattggttcatgtgattatggaggctgggaaatcccaaaatcagcagtcatcaagctggagatctgggagagtgaccatgtagtttcagttcaaatccaatggcctgagagccaggagagctgatagtataagttctaatccaaacactggcaggctcaaaacccaagagccagtgttttagttcaagtctcaaggcatgaaaagcaacatatgagctcaaggcagtcaggcaggcttctctcttactcagcatttttgttctcttcagtctgcaatcccttagaggcccatccacattagggagaagaatctgctttattcagtctaccaaaatcagtcagaaatactctcatagacacatccagagtaatgttgggtcaaatgtgcaggcaccccatggcctagtcaaattggcacaagaaattaaccacacgctgtataatatatttctaggaagacagaagttataggaggaaaaataaaacagggataaaaggagtgagtcacgggagtgctgttttagatagggcaggcatctgtcagggaggctttgaaaggtacatttccacccacgattggattaaatgggtattaacctcactcagattaatgtaaattccagacacagctgaaatgagccccttgctgcacatcccctacatggatggcttctgatgttgtctcccacagcagtgaccatctgtgttgcattctgtgaggacaacttccatggtagtgatagtgtgatatgttggaaaatacatattggacaaaacatttagaagacctgttgtggctgggtgcagtggaggtggctcacacctgtaatcccagtgctttgggaggccagggttgcaggatcgcttgagcccaggagttcgagaccagccaaggcaacacagtgagaccccatctctacaaaaattaaaaaacaaacaaacaaacattaactgggcatgtgatgtgtgcctattgttccagctactcaggaggctgaggcgggatcacttgagcccaggaatgcgagattgtagtgagctagtattgcgccactgcactccagcctgggtaacagagtgagaccctgtctctgaaaagagaaaaagaagaagaaaaaaatagctgttatccagtcctagctctgccggtaactagtaagtcagtcacttgtcctctctgaacctcaatttcattttcttttttctcttttttattttgagatggagttttgctcttgttgcccaggctgcagtgcaatggcgtgatcttggctcactgcaacctctgcctcctgggttcaagcaattctcctgcctcagccttctgagtagctggggttactgacgcctgccaccacgaccagctaattttttgtatttttagtagaaatggggtttcaccatttggcctgtctggtctcgaactcctgacctcaggtgatccacccacctcagcctcccaaagtgctgggattacaggcgtgagccaccacgccctgctctcaatttaattttctgaaaaatggggacaacatggcttctcatgggaatgttgtaaaagtcagactttgccaatgtattgaaaaaccctttcagaatgaaagtttctcgttgagtttttggcaatgtaaaatgaccttaactctttttataaaaatatcttcagtagtgtggctggagccaatctctacacagtaacagtgagcttccaagagttctactgtaccaaattcttagggattttcttttgctcttggtttggaaacttgaatgtaacctcacaggagacttaagtgaaaaatcgttctgtggccacagtattccttcaaatgtcttgtgtaatgaatggctgaggctgatattttgctagtggcatagaacaaaataattcaaagcccctaaatgaatcctagaccagttgtggtgaaatcattgtgaggttttctgactgaggttaagacagggtgaataaaaatagtacacactctcctttcgttcaacttagcctccagcattaggaaaatatcaaggaaggcaggccactttgatacaatctccctgattcctaaataactgtaatccactttcccagtgcggtagtgtggcagggcaggaggagagaacacatttaattgagccatcatggctcatttctctagtgccctgctggaagtgtgaactatgtgaacagaggaattattttttaacaacacaattcaatttagtttacctacactgatgtactgtatgtcaagagatgacccagataaagtggctaaaaagacaagttacaaaagtcctccccagtcaaggagttcagtctagtcaggcagatagaaatggaagccagtcataatattccagtgtgatgggcacaaaaaaaatgtacaaatccagagtcaataaagaggggcaggtaatgagttccatctaaggacagtaggaaaagattcatggagttggtaaagtgtaacctgggttttgaaggatgaataggagtttacctggcagcaaaagttatcttctgtcagctccgtcctttctatcttcactgactatgttgataaatacctttatctaaaaatgcattgtaaacatttcattatataaaccataattgggtctttaatttgaataccattagaacaaaaccaataatattgtttaaaaggaagatttttaatttggtaatttcatactattgccattacagtaacattaccccttgcccccacatagagttactctttgtatgattttgtttacttttataaagcgcttttttgcatctgaacctatgtcctttattatagtctatttcctctcactaagaatttaatcaccgagtggtgttaagagtcaaaataaaatgaaagaatttgaactgccagaagttgggagctttgttgtgttcccagttgctcagaatagtgcttggtacataataaacactaaatagattttcaaaaaaataaataaatttcatctaggaaattagttgcataacatcaaatgaataaacatgggtttggagtttctcatgatgtcagtaacacaataaaattggtgtaaaattattggaagaaggatgcttttcacatgggcaacttcactatgaaagtgcatttatttgggatggaaaaacattctagacaaataattggacatgttagcaaacagcacagattagctgtggacacagcaggggcaagccctgcagagacactgctttatgtaacaagcttttcccccttaatttctagatttacgtaacatagagtaccttcctgaagtcagtatatagccctgtggttaaaaacataggttgtggagacacattacttgggtttcaaatcccagctttgccacttcttagctgtgtgacaccctggacaaatcacacagcccttgtatgccatcctttctgactgcaaatgggaataatagtaatggtacctgttccatagagttgttgcgaggactaaatcaacagataagtgtggaaggcttaacttttttttttttttttgagatggcgtctcgttctgtcacccaggctggagtgcaatggtgcaatctcagctcactgcaacctccacctcctgggttcaagcaattctcctgcctcaacctcccgagtagatggaattacaggcacccactatcatgcccagctaattttcgtatttttgtagagacggggtttcaccatgttagccaggctggtcttgaactcctgacctcaggtgatccacccatcttggcctcccaaagtgctgggattacaggcatgagccaccacacccagacttaacatttaatataataatgtacatcatttccaaatatgaaatgttaagaaatcgctagttcttccaactcttctcatcacaaaactccagaaagtatagaagagaaaggggatcatttctcctggacttgtgcaattgttccttttgattctatctgtgacatgaaactattattattatctttgtaatcaaggccatatattgagtgcttttctttaagttcagctgcttaggcatttttaaaaacacaacctgtattttcagaattgcattttaggtaagacccatgtaaagttaagagctgaattaaaacacagttcaacaggtcatttcctctgtccctttgctttaattttaaatacaggcttgcagacaaaaaggatttatgttattttacaaattaatttggaatattgtcttagcaataaaagcttatgcactcattcctttatattatagatttaaactacatttagctgctggattttacacatttacctgggctcccaggcgtgtctggttttcttttctactacttgatttttaacacattttaaggtacttaatatattctttctgattgatgtctctctaagaatggtgaaatgggtaatgtgtttgccagtggagagtaatgttgtcttcagttttgaatctgggctcctgcttatagtaagacaatgatttgaatgcatttctttaaaaagattcactgtaacagctggaattatggttaaggtatatgattattgaacttgaacacagtggcttttaaattacctctttgtaccaagtatatgaacagctgtttgcccctggcacaggcaaacctgttgatgggacaaacattgtacatgtgtaccttatgatggaaatagccattagggttcattgtgtttatgtatgtcttagagctgctaacctggatttaggacacaagaaaaaatattgtttttacagttctcaagtgagtacgtactagtcttcaagaaaaatcatactttgcagtacaaaaccaatgatggattttgacttttgaaattgttgaaaaaatatcttcctatgagtctttttttttaattaaaatttttttatttattttattttattattattatactttaagttttagggtacatgtgcacaatgtgcaggttagttacatatgtatacatgtgccatgctgctgtgctgcacccattaacttgtcatctagcattaggtatatctcctaaagctatccctcccccctcccccgaccccacaacagtccccagagtgtgatgttccccttcctgtgtccatgtgttctcattgttcagttcccacctatgagtgagaacatgcggtgtttggttttttgtccttgcgatagtttactgagaatgatgatttccaatttcattcatgtccctacaaaggacatgaactcatcatgttttatggctgtatagtattccatgatgtatatgtgccacattttcttaatccagtctatcattgttggacatttgtgttggttccaagtctttgctatcgtgaatagtgccacaataaacatacgtgtgcatgtgtctttatagcagcatgatttatagtcctttgggtatatacccagtaatgggatggctgggtcaaatggtatttctagttctagatccctgaggaatcgccacactgacttccacaatggttgaactagtttacagtcccaccaacagtgtaaaagtgttcctatttctccacatcctctccagcacctgttgtttcctgactttttcatgattgccattctaactggtgtgagatggtatctcattatggttttgatatgcatttctctgatggccagtgatggtgagcattttttcatgtggtttttggctgcataaatgtcttcttttgagaagtgtctgttcgtgtccttcgcccactttttgatggggttgtttgtttttttcttgtcaatttgtttaagttcattgtagattctggatattagccctttgtcagatgagtaggatgcgaacattttctcccattttgtaggttgcctgttcactctgatggtagtttcttttgctgtgcagaagctctttagtttaattagatcccatttgtcaattttggcttttgttgccattgcttttggtgttttagacatgaagtccttgcccatgcctgtgtcctgaatggtaatgcctaggttttctcctctttgtacctctggtagaattgccagctcctctttgtacctctggtagaattcggctgtgaatccatctggtcctggactctttttggttggtaagctattgattattgccacaatttcagatcctgttattggtctattcagagagtcaacttcttcctgatttagtcttgggagggtgtatgtgtcaaggaatttatccatttcttctagattttctagtttatttgcatagaggtgttggtagtattctctgatggtagtttgtatttctgtgggatcggtggtgatatcccctttatcattttttattgcatctatttgattcttctctcttttcttctttattagtcttgctagcggtctatcaattttgttgatcctttcaaaaaaccagctcctggattcattaattttttgaagggttttttgtgtctctatttccttcagttctgctctgattttagttatttcttgccttctgctagcttttgaatgtgtttgctcttgcttttctagttcttttaattgtgatgttagggtgtcaattttggatctttcctgctttctcttgtgggcatttagtgctataaatttccctctacacactgctttgaatgtgtcccagagattctggtatgttgtgtctttgttctcattggtttcaaagaacatctttatttctgccttcatttcgttatgtacccagtagtcattcaggagcaggttgttcagtttccatgtagttcagcaattttgagtgagtttcttaatcctgagttctaatttgattgcactatggtctgagagacagtttgttataatttctgttcttttacatttgctgaggagagctttacttccaactatgtggtcaattttggaataggtgtggtgtggtgctgaaaaaaatgtatattctgttgatttggggtggagagttctgtagatgtctattaggtccacttggtgcagagctgagttcaattcctgggtatccttgtgaactttctgtctcgttgatctgtctaatgttgacagtggggtgttaaagtctcccattattattgtgtgggagtctaagtctctttgtaggtcactcaggacttgctttatgaatctgggtgctcctgtattgggtgcatatatatttaggatagttagctcttcttgttgaattgatccctttacaattatgtaatggccttctttgtctcttttgatctttgatggtttaaagtctgttttatcagaggctaggattgcaacccctgcctttttttgttttccatttgcttggtagatcttcctccatccttttattttgagcctatgtatgtctctgcacgtgagatgggtttcctgaatacagcacactgatgggtcttgactctttatccaatttgccagtctgtgtcttttaattggagcatttagtccatttacatttaaagttaatattgttatgtgtgaatttgatcctgtcattatgatgttagctggttattttgctcattagttgatgcagtttcttcttagtctcaatggtctttacattttggcatgattttgcagtggctggtaccggttgttcctttccatgtttattgcttccttcaggagctcttttagggcaggcatggtggtgacaaaatctctcagcatttgcttgtctttaaagtattttatttctccttcacttaggaagcttagtttggctggatatgaaattctgggttgaaaattcttttctttaagaatgttgaatattggcccccactctcttctggcttgtagagtttctgccgagagatccactgttagtctgatgggcttccctttgtgggtaacccgacctttctctctggctgcccttaacattttttccttcatttcaactttggtgaatctgacaattatgtatcttggagttgctcttctcgaggagtatctttgtggcgttctctgtatttcctgaatctgaatgttggcctgccttgctagattggtgaagttctcctggataatatcttgcagagtgttttccaacttggttccattctccccgtcactttcaggtaaaccaatcagacatagatttggtcttttcacgtagtcccatatttcttggaggctttgttcatttctttttattcttttttctctaaacttcccttctcgcttcatttctttcatttcatcttccatcactgataccctttcttccagttgatcgcattggctcctgaggcttctgcattcttcacgtagttctcgagccttggcttttagctccatcagctcctttaagcacttctctgtattggttattctagttatacattcgtctaaatttttttcaaagtttttaacttctttgcctttggtttgaatttcctcctgtagctcggagtaatttgatcgtctgaagccttcttctctcaactcgtcaaagtcattctccgtccagctttgttctgttgctggtgaggaactgcgttcctttggaggaggataggcgctctgctttttagagtttccagtttttctgctctgttttttccccatctttgtggttttatctacttttggtctttgatgatggtgatgtacggataggtttttggtgtggatgtcctttctgtttgttagttttccttctaacagacaggacgctcggctgcaggtctgttggagtttgctagaggtccactccagaccctgtttgcctgcgtatcagcaacggtggctgcagaacagtagattttcgtgatccgcgaatgctgctgtctgatcgttcctctggaagttttgtctcagaggagtaacaggccatgtgaggtgtcagtctgcccctactgggcggtgcctcccagttaggctgcttgggggtcagcggtcagggacccacttgaggaggcagtctgctcgttctcagatctccagctgcatgctgggagaaccactgctctcttcaaagctgtcagacagggacatttaagtctgcagaggttactgctgtctttttgtttgtctgtgccctgcccccagaggtggagcctacagaggcaggcaggcctccttgagctgtagtgggctccacccagtttgagcttcccggctggtttggttacctaagcaagcctgggcaatggtgggtgcccctcccccagcctcgctgccaccttatagtttgatctcagactgctgtgctagcaatcagcgagactctgtgggcgtaggaccctccgagccaggtgtgggatataatctcctgtagcaccgttttttaagcccctcggaaaagcgcagtattagggtgggagtgacccggttttccaggtgccatctgtcacccctttctttgactaggaaagggaactccctgaccccttgcgcttcccgggtgaggcaatgcctcgccctgcttcggctcgcgcacggtgcgctgcacccactgtcctgtgcccactgtccggcactccctagtgggatgaacccggtacctcagatggaaatgcagaaatcacctgtcttctgcgtcactcacactggaagctgtcgaccggagccattcctattcggccatcttggctgccagtcctatgagtcttaatttcaagtgaaatatgcctagttgtagtttgcttttaaggtttttggtgcttaaattatgtgacataaacactcaaattatttttctagataatgttttctgcatgccagataggattatttccctcttcttttaattagttacttaattagtaatttttaatggtgtcataagcacccaagcccccccttacccccaaaatctaagaccttgaccataccccacacttatgcttttattttctttaagatgtcttttgatgaccaacttaaacatttttagtcttattaaacttatcaatcttttgatttatagtcaattagttctatatcttgtttaggagctatacagaatttgtatttccaagtcatttctgacttgaatgagctaaataaacagaaaatatctattggaagttattttttaaaccagaaaataccaatttcattacctctcttttaaataagcagaaagcgttccctttctaagatcctatccacatggttcccaattaatttataagtgaaataatatccccagtagttttggaaaagaaagaaaactactctccatttgagagtaacttttccccataaaaacagagaaaaatgggttcttgaagcttaaccagacttcaattttccctggttatgtccaaaaaacaaattaatttttatcccttgacttcttgtggcattccattttagcctttttcttagtgtggtacagtagggttgactcccaaatacaaagttaccagctgatggctctgtatttggtgattaagaaagggaatctggtgccagaaagtgaatacacaaactttggattaagttgtactgtttagcttccataatgaatattggagtatttcattggcaaattcattttttccccatctggtaaaagcatctaggtatcccatgaatatttatatctggaaaaagtcaagatcctttaagcaaaatgtggcctggtaggcgcagagacacgtatattaaactgcctatgccaaccataatagttcaactatttttttttaagtaaaagcatattcaacttgtttatgaatacttctgtattttggttttcattatatatgttaaaaaaataaagatttttttagaccagcaagaataaaaaggatacaggaaacccagccccaaacccctctgcccgccacacacacttaatgatctctagtcctaacatgaaaattcagcaaagttaagcagttctttggaagcacagaccagagttcgaagcaatgttgcgatcggtactaaaagtattggtctgttctcacgctgctaataaagacatactcgagactgggtaatttaaaaaggaaagcggtttaatggactcacagttccacatggctggggaggcttcacaatcatggcgaaagacaaaggagaagcaaaggcacatcttacttggtggcaggcaagagcacgtgtgcagagggaatctcccttttataaaaccatcagatcttgtgagacttattcgctattcagagaacagcatgggaaatacctgcccccattatttaattacctcccactgcatccctcccatgacacgtgggaattatgggagctacagttcaagatgagatgtgggtggggacacaaccaaaccatatcgacattgttaaggatttgtgaaacacttggagaatattcctttgtcttggctcggtgtgaatagaaatggtgagtttcccctaaagaaacacagacctaccctagatcaggcagcctcctccattgttgtagagacttaaccattcaccttctgcatttccccagcattgctgtgagtggggccttctctaatagtaaaacataggtaccatggccactgggcatcctcttctgaatctttgtcctgagtcctaactgagccatttaaaaaaatcaattatttacatgatctttaggagcaaaatttactgtcacatacacataatatgcaaaaaacatttgactttggggaaactctttggcctttttcccattatcttgttccaaaagcccttcctactttagaaaaagtctctgtacctttgttggattaaatacgtggctgtaatgtttccttgaattcagaaagtccgcatttctcttttttctatcacttcctgtagcataaatttatcaggataggagagccgtctttttgcctcctggccgtcttcccatctcggctgactggcacacgctggtgttgctaagacctttcctggaaagaatcaacaggcaaaagctcagagctggatgcttttgcacagacactactttctaaaatacacagaaggctgagttgtcaggatggtgtgaacctgcccagtattttcctatttccagagtactggctctactgccaacagttaccacaattttttttctagtaaaatacatttaagggaagagttgtaaaaagatggctgctcctacgggaactcttttgtattcttagcactaagttgtctaaaagacattaagatggactgtttttgaagttgctctgacagtaacacatgcgcttttctggtttgtgctttgcagaagtgaaatttgtctgtcaaactccagcaattgctgacattgtaatcctggtcgatggttcatggagtattggaagattcaacttcagactggttcggcatttcttggaaaacctggttacagcattcgatgtgggctcagagaagacacgaattggtataatttctattattagcagtagcagtcagttgtcagtgcaaaactgctgggaagtattttaagaaatttcaaaaattccttacaaagtgactttcaggattgcaggatactcatggtcccctaaagtacatgtttggatcaataaatattatttattccttctaatttttgcaatgacactgtcattcaattaattattgaacatattttaatcttctgaaaagtcaagttcttctctgttactttaaaagttacagctggtttaagaatttattgcatagcagttttctttttatttaaaagaaatagctaaatctaggaaaatgttgaactagaaaattggcagtcatttaatagtacaagataacctttgccaaattaattctagcccagataagaagcaaaaaagttgtaaatctttgagcaatattgagcaattacaaatatttattatttgtaatcaaataataaaaataataaatctttattaaacaaagtctcctagtttaacttttaaatagccattaagaaaaatgactcctttgagaataaatcaacaacaaataaatctagaccttttatctacaaacatgatcagagttttttttaatgccaagtacctaattgggcgctcatttataaatggctaaaaaatatgtacactccctcaacccccgtatatgtctaacttgattcctttaattgatcttactcagcaaatctttttgaaaatttatagccaggccaaaataaaaaatttttgcaaagatgaggcctttcgtcattccagtttcttgagtagcccactagatttttgagtaacccattattcctggtgcgtttcctaatctttttttccaggtcttgcacagtatagtggtgaccccagaatagaatggcacttgaatgcatttagcacaaaagatgaagtgattgaagctgtccgaaacctcccatataaaggaggaaatacactaacaggtatgttttgttcaatccatgttataacaacatatctttttgaagaataattgtattacctcattttgccactttgtaagcgttatcataatgttttaattaaactagcacttaggattctttgatggctgttttcccaaactcagcattgagttaaaagccagatatctcattccttttactctatgactataatgtcccaggaagggcttggttgggctaggagaaaatgaagcaagccctgagaccaacagagtggagtagctgtctaacttttgtcagctaatctcttcgctacttttctcctcctgccatcctccaccctgttattcaaatataaacaaatttcttcttattttcaaagaagatattttctttgcccttattctgcaatcattagttatcatgaaaatattgtgaaataattttctaaaaagtcaagatcctctcttttcataataataatatggatctttggctcacagtatttttgatgaatgacgaatataagaatatttacattataatcatccatggcacaatcacaaggggtttgtaaaaattttcaccttgagacatgctgcaagctgagcatcccaactctgaaaatccaaaatgtttgagtgccaacatgatgctaaaaaaatgctcattgaagcatttcaggttttgaatttttagatttgggatgctcaaccagcaaatataatgcaaatattccaaaatccaaaaatacctgaaatccaaaacgattctggtctcaaggattttgaatagtggatattcaacctgtattgcctgccacaggcacatattagagatgctcagatgaagcaatgtagatgttgttattgatttttaggtaaaccagtagaatcctgatcattgctttgccaacttgaggcaaagtctcgtggaatttttgttaatgcagcaaacaatttattgaacacaaatcctacaacaatattgcaccatttcttatttttttctggatggaaagtgtcatgctcaaaaggcaggagtacgattaatgatattagatttgtcccttctactcctaaaaaacaaagagagggattttttggttctttagaatatcacgaacaaaattgaaaacctagtgataacgcactactgtgtgagtattcttgcttcatcctgaattataaaggttcagatctgcttgtacatgaaatctattatcatccattggccatgaattcagtgttctttataaatgctagtttctgaaagaatgcagtgtttaattattttcattacctttattccagtggattttagttccttgttgaatctgtgaaagacaacgttattacaaaaatgaagatttgcatgtaataaaaagtctatggctcaataggttacccatcttgtggttatatcttgaagaattaggagactttttattagagatagctggtgtttacttttccttgttttctccaaggtcttgctttgaactacatttttgaaaatagcttcaaaccagaagcaggatcaaggactggagtatccaaaattggcattttaatcacagatggaaaatcccaagatgacattattccaccatctagaaatcttcgtgagtctggtgtagaactgtttgccataggtatgtgctctttatagtcttgtttcaactaagggcatagacccacaaccacttaaaacaatatgtaatgtgaaatgcacttcactgaaagccaggagacctgagcactttctagtcttggcacttgtcataggcagccctgtgatctgagcccagcttccttacagttaaaatgggagtgatgctagctgtcatgtatcccatggtgtgaggatttctaagtgaggtgtcatatataaaatgctgtgaaaagcataaagtggcatgcaaaggtcaggtacatgtttgttactgtttagtaagtcaagactttctcttaagggtcatagctatctcttttctggtaatataggaagaatctaatttatcattttcaaggaaatacgatcctgcaactacgtaaagaagacacaaagttcaagatttgtagtagttcttatctgaaactaaccctttataaggtatccttcttgtgtgaaaaagcatatatatatatagatagcatacattcagaataactacaaaatatttagatgatgtgactttgctgttgattaaaatgttaacattttctttggcaatgggaacgtcttctatttagtagagaacaacaaactttctcagcagaaaaaatgcctgattcccaagcaacactgaaacacaaaccaaaatataacagcgaattccttaatagggctctgaagacatttgaaattggttatcatgaagggtcccttttattatgttttacatatttaattattttatttgtgatcaatctttagtccaaataaaatgcatttatctttctgcatttatcaagaatatggtgcatttttctttttgtgaactttccatgagctgtttcttctatcaaaagatagtactctctgctctgtagttacatacccagttatagtgggtgctggcataaaaactacatatttcagagtattattctactcttatgaaattgaactatccagggagaaggggcctgggaatacgtgttttaaaaccatacccagttctgtaccttaaaatcattctccagggttgagaactactggtaagcccaagggaatatctcctctaggtatactgtaagtttgtctcctttagagaaagatcctaaaaagttttcctatttatatatatatatatatatatatatatatatatatatatatatatatatattatttttcatcagaggaggtttctgatcattttttcagaacttgtttcctactagtatgtagccaagtacagtctaagaacagctgcagaagctgtggaaactatgatgttccctcctgtttcttttccttattcctacagcatctctaagcagtgagttcccagaggttcaggttgtatcttcttcactttttcatcctgatcacctatcccagtgcttgacacttaaaaagtatccaataaatggctgtttaataagttagtgctctaaagaatttctaagatagcattatttcccttagtattaaaaataaaaatattcttgaaagatacatgtaagagaagtgtattattattattcaagtaagtgatgtatattatcctatagtaatgtagccattactgctacatttttcatttacagaagaaagaacaaagacatccagggaaaaaattaaaaatgtattatgtttgaactttgttttggtaaattagaaccttgttattttgtgtgcatgtgtgtgtggtgcaggaggaggtagctgttatagctcagtgttgtgcaggagccagctcatgccagtttgcaagagccaattgtgcacaccttttcccaagtctgcatcctgtgacctcatattggtagtttggaataagctacagtggggtatttattctacagaaattggcaaacactacaaatgagggcagaaagctgactgttaaatatttacatttaccagcacacccctggaatttaaatgggcaataaatggatttaaccatacggtagcttcacttgtaaagataaatgtgaagttggtcctaggagttgagttaaatttgctgtgcaggaacatttcttaccctgaaatttaacagtacatcttttagagttatcaatgaaaaaaaaactttagaccctgtcctagatttgctattcacaatgtggcttatagaatgcttgattcaagaagtattagcttacatactatgtgccaggcattgtggaggttgttggggtacaaagatgaacaaggcaaaatccttagaaaacaaattcctccaaagtcgtgatgaccatttcctctcttttctgtgcagttgcaacagtcaaactattttatttgggaaggtgagggagaagcaaaattgggcctatttttcccagaatatttctatataagtccaaacttgttggattcaactgaatatcacaaaaaaagcattattggcactgcttcagcatacactcaatgttatattaattcagatgtacatttgagaagcaattgtagaagtccttcaggcaagaaccatcagagagatttattttcctgtccttttgtccaataaaggaaatctctgccaaagacttaaactaatggagaactaatttatatgtttattctccattttctgctcttgttaatgatgaataggtgagtttttaagcaaagctttcagtaaattcatccagatgtgatttagacttctctgaaaattacttggaaatcagcagtatttattaacctgcaacctcctaaagcaaatagttcagagacaactaatgctttgttgctcaatatgttggggttgaaagataaattaattggcacagccagccatctaagaagtaattcatgttgccccaggtaatttctcttccttgcttctatagaacctccttttaataccctccgatgattgaaatgacggggattataaagaaatcctccttgtttgatgaggcttggagaagggaaatctacttcatacccataaaacttaacctcatgcctctcctttcctatctctaacattgttggtaaatgtttactcattttaatgtgcagtcttctgagaggcagtataaaataggggaacaatagttccaaactcataggattgattgtcaggattaaaggtgttattatatggaaaacacttactatggtgcttgggggcacagtgatcacactcttttttaagggttcgtgttcactgctttctgtcctattctattccctgctgtattccagacacccaactttgtgcttgaccatggtattcagtagatactgtggaaggaccaggaattttctatttacattagtaaaattgcagtggttactagacagcaaattgtatttgagtatgttaaaaaataattttccctagctttctccttggcttaatgctatacaataataataatttcaaatatatatatatatatatatatatatatatatttgttctagcagtatttctcaatttcagtaaatttattttatagaaacttaaacctgaagctttgatagtttaggatgctggtttaattactattgcttctgcaatattcatgcaaaacagaagttagttttattaagtcatcttcctgttatgatgtattgagtaaaattaatatctaatcatttaaaaacgattctgcaactgatttctgtaaaaagcaatctcacatgaaatgttcctctttaaagtggcagatgcttttaaccaaatccaagactgcaggtccaccagaagtggggagggtaactgaaacagcctctcagatgggggtgggggggggtcccaagtgttgtttaccagaacacaagcatataacagctttcatcttggcaatggtacatatgctcgctcttccctttttttgcttattttctttctatatgaataatttgttagaatcagagctattgttttgtgttatataatagatatgactatattttttcatttcatcggtttatttcgtgtgcgcattttaaataaaattttaaatatatatatacaagtagcagatgatgctttgactgcagtgaagattgactgactgggtcagatcaggcccaccgcagtcactctttccaagggggcataaaagtcaccattctcttttttgtcctctgtgtaaggggtgaaaaacgcggatgtgaatgagctgcaggagatcgcctctgaaccagacagcactcatgtgtacaatgttgccgaattcgatctgatgcacacagttgtggagagtctgaccaggactctctgctctagagtggaagaacaggacagagaaattaaaggtaaaatgagtgacagagcagtcctgtggatgtcagtattatggtgcacaagcctattgtgaattgggaaaattcttttcatttttcatgttggctttttgaagaccccttattcccctaagacctgagccgtcagagtagaaaagggagtatattagcaggctttgtgggggtgaaggagggactctttaaacacaagatgattttctccataatgttacatttacatttatttaaaacttaaacttttaattttaagatagttatacattcaaatacagtttgtaagaaataatacatagaaagattgtgtgttctttactagttttcccaatggtaaaatcttgtaaaactaattacattaccacaagctgaatacttgtcattgacacaggcaagacacagcacatttccaccacaaggatcactcctgttcccttttatagccacactcacttatatccctcactctctctccctaatcccagacaaccactactccatctccaatatttttcatgtcaaaaatattacgtgaatggaggtatgtggtatgtaacctttggggactggcttttttcatgcaggagaattccctggagattcatccaagtcgttgcatgtgtcaacagctctttctttttaactgagtgccagattccatgatatggatgtgccacagtttgtttaaccattcacacattgaggggcacctgggttgctttcagcctttggctatgatgaatcaagctgctgtgaatgttcatgtggaggttcttgtgcaaacataagttttcatttctctgggacaatgcccagtagtacaatggctggatcatatcccggttgcatgttttgtttaatgtagttttcattaagactggcctccttgctactggacggtggtgaaagtcctgactcactgctaggtctcctctgacactgtcacagagtgagggagaatggtgcctcattactcccaagtggggttgagggtccaggcaggctcttcatgtggtctctcttgatatcatagataggattgtaggggaaaagattcattaccatctgctggggatgaatatctcttctctacttgacctctcacaccaacctagctggcatgagggggttggggtggatgttagggcaccctattacagccaaaaaaggctggaattttgacttcccactaggcctttgctggcatgggtaaaggtgtggccacattttttttttctgtgttgattgtctgcagtagaacaattattaccaaaaatgtttaaaacgtttcagtcttggtaggctggccatttcctggtcctttgctagagggagaagattttgttagcaatttttagtctgtatctgttggtgtttctaggttgccagatactttagctccatgtctgggatatatgagtaaaaggaagtgggagctcaccgctgggagctcctgagccctgtagttctgcactcattgaccttcttctctctacttttcagcatcttcttatgcttgtctttgatataatttccagagtttttagttatactcagcaaaaggaatagagtaaagcacttactttatttggagagatatcatatcattggtctgcagattgtgcttgccttatagagttgtaatctgagaagagggtaatatccaagtcttctttcaagagtctggttttatttgctgcctctgttgtaaccagtgtgaaatggttctttctggctacatgtccttctctctatcatcattcccctttccccaggctagatcttgtggggctgggctgggcacccaagcagtatgatcctgaacacatttctctgagcttcaaagtgaagctactttagagctcagtttttccaaaatagtctacatgtggttgatgatacagcatgtaataaagttcctgcccatagtttgtgttcaaaacagtattttaaaaattgagattattaaagtccctttgagtaagtgctcttaaagggtgagaaattctaaagtttaagctctttattataatttacatattgtattccccttccacttagattttgcatgtcccaaatttttatagaatcatttgctttaacatgtgtaacacacacacacaaatgcttacctagtatcgagctcatagtgggcatttagtatatgttagttgctttttctttttttaaatttttaggtattagtcacttgttgaattgaaatttttagtatagagcctgtgttcgctgatgcttaaaaacatagactcttgtgtcaagcccagatatcaatgtcaactctgatactaattgtgagaccttggtcaggttagctaacttcactgtgcattgattttctcatatatgaagtgtgaacagtaataggaactagggagaagtagatgagataaaaaaaacttcttaagactctgaagagtaccttttgatacacacatgcttagttaatgtttgtttgtttgtttgtttgttttttggaggcagagtgttgctctatcccccaggctggagtgcagtggcacgatctcggctcactgcaacctctgcctcccggtttaagtgattctcctgcctcagcctccaaagtagctgggattacaggcacctgctaccatgcacgctaatttttgtatttgtagtagagacggggttttgccatgttggccaggctagtcttgaactcctgacctcaggtgatctgcccgcctcggcctcccaaagtgttgggattacaggcatgaaccactgtgcctggctgttaatgtttgtttttattatttattaacaatgaccttaatttaagaaagttctctggagtcaagaactatgtcttatttaagtttggtatcctcggaacttagcatagtacctggcacctaatagacatttaaatgtttgaatgaacaaatggataactgaatcaacttatctaaagaggaaaatcttagaggcagcataaaatcaatatttatttctgtctaatgagatgtcttagcttcataagaaataactttgggtaagaggtttatttgatatgtttttttaatttagcctcagcccatgccatcactgggccgcctacggagttgattacttctgaagtcactgccagaagctttatggttaactggactcatgccccaggaaatgtggaaaaatacagagttgtgtattatcctaccaggggtggaaaaccagacgaggtaataaggagagagtattttcaaaccattctttttattctctcaagtcttctacaatagtgagaacaaggcagaaatataaatataagattattccgtcacagacattttaaagaatttgactgaaatacatttccacttgttcatattgttctcccctatctctgagttatggcaattacatctttcatctctccaaataacactcagaactggtcaggtatgaatttctaacacaacgtatttttcttcttaaaattaataagttctaaagtaaaaggtatcagtagctaattatctggccaggaccccttttgctatttgtgcattttttctacttgggagtggtctgagctttctgccttagttaagtctgtgaattccaaagtacgtggtcatatatggactagtcctccaaggcttggagttttccggacatttgtagggattagtgcaatggaaaagccataataaagccgctatggctggcatatttttatggcttggccaacacaggcgagaacacctattgccagatgattagatccttcccatttcctacctttgataccacaattcacaagcaataagttaaaacacgatgaaattcttttgtctttttctttttgttgttctagcctctgactgacctcagcatatttcacaatgttctgtgttatggtaggatttatgatattttttaagtgttagaaaagtagattgtggagtcttaaatcatttggaccaaaaaaaaaaaaaaaagatccgagtgcttccaatgattcttttatttttcatgactaataaatcttttaaatgtttcccaaagctctatggaaaaatatcatgtttactgttattaagtggatgtaaataggataataattagcctggtattgacacaattatttctattagatatgaattaataagggacttctagacacattccataaaaggtgcatcacttcacttaggaattcaaagagagttgactgccacagtggaaagggggatgtggcacaaacaagaaaatattcaatgaaatatttttgctggacgtattttcgctttttgatttcaattctgcgtgtaagatattccatactctcattactcaaactgttctttaaacaggtggtggtagatggaactgtatcttccacagtgttgaaaaacttgatgtctttaactgaatatcagatagcagtctttgcaatctatgcccacactgctagtgaaggcctacggggaactgaaactacacgtatgtatttaattctaccccacttctaactttgtagagtgctgcttaggaggcctttcttaaattgaaattctgctcaggtcatgttgatagacatcctgaatcgaattcaatcaaattcatagaagacatttgtcgtgctatatgtgatactggtccatgcttgatatagtcttgccggtgctatgtcttgaaaaagttgttataaatctctgataggtttaagagcaatcttggtggtgaagagtacaaaaaacattcattcatttattaaataagtgtttagtaaatgcctattatgaactaagaattgtccttgaatttgtcagtagaagtagagaaaaaactccatagctctcccgcccaattgaatgccaaggaaattatgttactgctatctttattgttcatatcattgtaggtaaaacaagcttctgaatactaataattccctccctgggtaggatcgtaataacacaccatgacaacatacacacataatacacacacgcacacagaatcatgagaagagataatctttaaaaaaagatcgaacatcttatagtcatttctaatattaacagagttcctattacatgcaagtcactatgcaaaattgctctaaaaaatctgcctctgatagaacaataacagtgtaaacaacactaatcacaatgcgccaggcactgtgatcatcactctctgaactttcttggatttatccctggcaacaatctgtcggatgagtgttaatgccctcactttgcagaaatattttagtgacaatccttattctcaaggatgttttagtgagcctgggcaacatggcaaaacccgatctctacaaaaaatacaaaaattagctgagcatggtggcacgcagctgtggtcccagcttgtgaggctgaggtgggaggattgcttgagcccgggaggtagaggttgcagctaagattgcaccactgcactccagcctggatgacagaggaagaacaggtctcaaaaaaataataaataaaagaaaaaggatgttttagtgtagtagggggtggggacgcaatccaaggacatgcaaacagattagtgcaatgaagggctgtaagcactctcatagatccctgtacaaggagctggaaatgtcagcaaagtcctgaacttgacactgtggttagaagagtagggcagggtcacattagggagggtctagaaccatatttgaaaacagcagtgtttcctgtttttcatcagcattgtttaacccaggaacttgcaatttattcttaatccctttctcccttcccctcaaatatggtcaatcttatttcttgataatttcatttttctcaaggacacatatataagtggctcaacatttaaaaaaaaatctcttgcagttgctttaccgatggcttctgaccttctactgtacgacgtgactgagaacagcatgcgagtcaaatgggatgcagtgcctggggcctcaggttacctgatcctttatgctcctctaacagagggcctggctggggatgaaaaagaggtaaccacttcctacctattacagtcctagaatcttttatttccttaaataaaataaaatttttattgtaaaaatttaatgtagaaaatttagaaatttcagattagccaaaagaaaaaaaaacacttataatcccaccactgagagatagccattgttaacatttaattaacagtctttgtcgatgcattttgaaagcaacacatggaaatggtttcgtagcctgctgttttcattttatttgttgtgaagctctttccatgtcattaaagaacattttacaaagtcattgtatacacccatagtattctactgttggtttgaacagatcatgtttaatcaatctatgttattggatatttagatagcttgctatataaataatgcttttgtgaatattcctaacatatgtttttgcataattgtttgattatttccctaggataaattcctagaaatagagtttatttttcaaagggtaggcaaattattaaggtttatactcagtattgccaaatggctctagagaaatgttatatgttttgctttatgtggtgcataagtgactgttttctccatatacactgaattaagttttttcttactaatttgagaggtagataaacatacctcattggtgcaaaattttgaatttattccattttaaatgatgaacctttgaccttcagatgactttcaaacattttagtcctcatttttaatttgtagtggacaatagctataatgcagacatttaaggaatgaagaggatgaatctctggcacttggaagtgtaatgaccaggcaggtggagttaataagcaaagcaattcagagaacttgattgtctaaaattgtgtaaagcctgtccctgatgattgaaatctttagggtcaaaaaaatggtgaatctgagtgtcaagaacagagtattggtgacatgtgtctttttatttccaaggcttagatggcttttgtctatttgaatttaaagttgatctaaattattttgacaaaagagagacttacaaatagtgctgagaagatgctcagcctcactatgaaagagaaaaaaaaaaggaatagtagtttaaaaccaatagattagcaaaaaaattttaaagtctgataatactgtgtattcataagcacacaggaaaagaatcgctcctgtaactgctggcgggcatatagattggtacagctcctttggaggatattttgaaatatttcatcctgttgaagatatatactactttttggaaatgtatcatagggaaacatcttgcaagcatttttcaatgcaggcacttggttggaataaaacattgcagacaactaacaggcctgttaatagaggaatggaaaatagtggtatatttatagaaaagaatatcataaaggaattaatgatgtcaactctgtccttatgtatcaacatggataaatctcaaaatgtaatattaacacagaaaaaataacaagctgcaaaaagattgtgttgatatgatcccattatgtgcattgtgaaacatacaggatcatatattgtttatagatatatctatacacatacagaagtacaaaaatgcagcagtaagatatacatcaaccttagggtggaggtagtggacagaaagaatgagaaagacctgttgttttatctgaatatattagttttttaaaaaataaaatctgaagttgatatgacaaaaatttgatatttatccaatttgagtaatgggtacatcagtgtgtattatattattttctgtaagtttatgttgtatatattgagatagttcaaaattcaaaattttaatttgatgattaatcctggcagtcatgtgcctgtagattggagatttattttttccttccaaaacataaaactatctcgtcactctactgtcacacaactgagaatgttggatagtttgaatccaagggtcagaaaaggtgttcaagaatcaaaaaagcaaattgccaagttgggtgtcaaggtgagttgatctcttctgaatactggaagtaacttgcaattcaactgcgtggattctcttgttgaatggggacacaaaactggcccagcttcattgagtttgaagcaaaaactgggcatctggccagagcactggttagtattagccaaatactgaaagatgcccacttggccttgcctccagcacactggcctggagctcacagtctctagagaacatttctgattcaatcccacccaccttctcctggggagcatatactcaacattgttattctggctggagttgccatttgtccagatgtaaagagttatcctaacacagttcacatggtacttttcgacttatatggttccataatatctgttcctagtataaaatgacacaagacaatttaaaaattatgactgaagcctgtttgatgaaggggttgtaacaggacgtaaagtcttatcccatgaagtctcacctttgttctgttccactctgatcagcatgaataatatgtattggcaaatgatctaacaacatgtgttcttttcagatgaaaattggagagacccacacagatattgaattgagtgggttgttgcccaatacagaatacacagtcacagtttatgccatgtttggagaagaggccagtgatcctgttacgggacaagaaacaacatgtgagcagcacagccattcagttgggatgctgtagtaaaagcccacatgaatgtggggattctgaattggaactactagttttgttgaaacctcttaaaagctaattataattttaaaaatctcatgttctatttagggcaaggaaatgtatttcttatatattatattattatgagtgataaggttgccagaaccaagcttcagcatcctccagataattccacctatgtctttctttgtctaaattcaaatgcaggtcagaatctagagggaagagtgtaggctttgcaagatagcagctgagatgggaatctcagctcaactcatattttagccaggtgacaatgggtgattgatacaacttttttgattgtataaaaggaagaacaataatcttgcagcatgtggttggtataagattaaatacagtagtatatgtgaaaacactcagcacatagttactgaatatctgtttattttccactcatatcaaaattaacaaacattttttcctaaaaatctttgctgtctttaactgagcctattactattgtaattcattttcaattgagtaaaaattttgttggtaaggctaattttggataaatgtagggaattcctagaactttttgggaaatgtatgcatttatttttaaaaatatggtataaacaatattactgtggcatactgataatacttaccacatactattaaaatatggctctattcgtgatcttttgaaacataagaaagtgcagggagacttggggtcttgctcaccactcttctcctagactcgggagatgaatagcacaatttctacaatgcctttctcattaagattccatttgggaaaacaaaatagaagtttaatgataaagaagtttgcacacatccactctttgttagtcaagactatgttattcttgctcttcggagaaagaccaatgtaattaaaacaacaaagaaacaaacaaaagctctgggagagcccaagaaagaaaaagaaaagaaataaatcatgctagaaagcatccaccacataagtgaattctgggactctaaccatttgaaagaaaagctttccccaacagcccatctctgtttcactcaaagtgttcacttctttatacttcttaaaaatatgtacaactccttcccatgattagcaaaaaggtcctaaaaaatgatatcctagatacttgttcctgaggctggcatttttatgtgctaagtaaattagacactattctattatattgccaaatgtaatagaattccagaaaaatttagagccaaatgtgcacactacttaattatattgcttttttttcttttctacactttctctctagcaccttaattattaagagattcactaactcctacaagatctttattgtcaaagaatcagtatgtattgaattaatgaaagaactgggctttgaggttaggaaacatcatgcttcgtggctatggctggtaattgtcatgatttgtcttcaagttttttgctttgctggctctatcagcactgactttgtgggatgagagagtgtgagtaagagagagaaacagtgagagaggagaaattagcatcctggttaatatcatgggctctggaatcagttaatcaattttctaggttaaattctaattgctcttctgttcctagtaactgggacgttggccaagttacttcaattttgtgatcaatatagtggggataattgcaactctatccttgcattctaatgtaagaatttaataagttaacatatgctatgtgtcagactcatggacaacactcagtaaatgttaacaattatttttacaataagcctgtaaagagctcatgaagctgtcaaaaattatggacaatttttaatttgttgaattagataggggtccttgaagaggttcaaaaagctatggaattgacagttaggaatctgcagaaatgccaatacctctttaaataattttaaagcaatagtaagatgtttatttttatttgtctcacaaagccactgtgatttattcaggtcaaataattacccattgattcaatgaatgtttattgagtacttgctatattggggatagatctgggaacaaaatgaaaccaaattatctaaccccctgagattacaatatcctgggggagagagacaataagccagaaatatacggtgaaaaaaaatagaacagaagaaggagacaggtagtatggagtggaagagctgttgcacgtaagatgatcatagaaagcttcaccaagcaggtggcatatggtcagaaacctgaaagaggcaaagaaactggctatgcgtatatctaggggaagagccttgaaggcaaagagaaggcaagtgcagtggcctatgaatgagcatgcgtggcaggttccagtcacagctagtggcatggaaaaggcacggagtagtagcagatggaaccagtgaaatagcagcaggccactgatgtagggccataaagaccattctaggcttgctgcggtggctcacgcctgtagtgccagcactttgggaggccaaggcaggcagatcacctgaggtcaggagttcaagaccagcctggccaacatggtgaaacccccgtctctaccaaaaatataaaaactagcaaggtgtggtgacacacgcctgtaatcccagctactcaggaggctgaggcatgagaatcacttaaatctgggaggtggagtttgcagtaagctgagatccttccactgcaccccaccctggatgacagagtgagactctgtcagaaagaaagaaagaaaagaaaggaaggaaggaaggaaggaaggtaggaaggaaggaagggaggggaaaaaagaaaagaaaagaaaagatcatgctaagaactgtgggtttacgctgagggagttgggaaccatttggaaggttttgtgcagagaagtgaaattacctggctgacattttaaaagaagcactctggctgcttgctgaggaataattatattaatagtagggggaagatggaagttgggagattggctgggagaccatggcaaaaatccaagccaagaggggatagtggcttctaccaagatggtggcagtggaggtgaagagaaggggtcagatctggataatggattagaagtgggttgcgagagaaagagcaatccaggaggctccaaggtttttgactgatcagtgggaaggatagagtttccatttgctcagaggggaagactgagggaagaggcaagaggggaaggcatcaagagtcagtgattctgtttggactggttaagttggagttgcctaatagataccaacgtggaaatggcagatgggcatctcattttacatgtggaaaattgtggagcttagaggtagagtggctttgccagagtcacatggtaattgagtggactagctaaaattttatttcaagttactttgtttttaatccattaagtttcctacttacatcaagctagagtgataggccgagaaaatttacctaaatcctatttatttctaaccatgtgtaacttattactgctatttattctctacaaagaaaacttttttctttgctaattagagaacattattgatttttatgagacaatacactggttatttcagtgttataagttattatctaggtgacacttttcatatgtaaatagtttagaagtcaaagatgcaatttctttttacatgtatgtaatttgacattttaattattttctattccatttactgccaagtggctttaagtccaccaagaaacctgagaatctccaatgttggctctaacagtgctcgattaacctgggacccaacttcaagacagatcaatggttatcgaattgtatataacaatgcagatgggactgaaatcaatgaggtaagttccgggacataatgtatattttttaggtagtggcgtgctagttatttatggctacataaccaatcatctcaaagcctagtggcttaaaataatagtaattatttattgtctcgcatagttcctgtatgtaggtcaggaattggggtgtggattgcagttatcactggaggaggggtgctccccagtgaggttagggccagatagtggctggagctggagctatctcatggcatctttactcatgtatctggtgcctggtctggggagcctggaacagctgggagctgtagcaggtctccatatctctaattagacccttcacatgatgccttcagcatgcagcttcaggggagttggctcaggagtcccatgacccatgtccaaacagagagagagctaagtagaagctgtaccaccattaatgacccagcctctgaagtcacttgatatcacctctatcacactccattagtatgagatgtcaccagcttcacccagatttataggtggggagaaacacagatcctacctatggtgggagacaggtcagtcacaggataggaggagcatatagagaagaagatattcattgatgtggccatctctggaaaatgcagcctgccacaggggatgggggtggggaaggtgtatgttcatggaagcattgtattaaaaataatgtcactgttgtctagtttatcctgcttttgagtaaactggcatctgaaaggctctagttagatgagcctaaatttaacaaataattcaagttttatctaagaagtactttcagataatggaacttgttaaaacccatgaagatacagtatcttgcatgcagtgactaatactttcaaaaaagtgtttccttggaaatgtgttttagcaaaacagcgaggttatttttattttattttcccttatcttggtccagtaagctaaggcaaagaaggaaatatgttagattgcatcatttctattttctgaccaaataaagcaagtgtttttatatgcagagacaaacatttttctaaaattaaatccaagcaatattttacaaaatgcatcctcatgagggacattgtgtaatggacgggcagtaagtacacatttgctaacatatagaaatactgttcaatatccttcattaaacctttgtaaatcttgagagtaaataatcctgaagagtctggtcatttggatgagttgctttgttattgaagatagcagcctggagcagtaaaaagattgaaataaaaaaacactgagctataggtgtctctttgtcaccagaaatacataaactactttcccaagggttaattcaactgtgtaggaggatgaggaagataatataaatgagtgaagcatgccattaaatctgtagaagcagacacacctgcaaagaaatactctatgttttgcttgacacatgaggctaacttaggctatattatataatatatataatttaaatatataatatatatttacaaatatatattatatatttaaattatatattataaatataaataaatatatattatatatctatttttatgtatctatatataaatatataatatataaatataaatacataaatatataagtatatatctatataaaaatatataatatataaatataaataaatatataaatataaatatatataaatatataagtatatatctatatataaatatataatatataaatataaataaatatataaatataaatatataagtatatgtctatatatatataatatataaatagatatataatatatataatatatatcatatatatatacatatttgagatggagtctcactttgttgcccaggctggagtgcagtggcatgatctcagctcactgcaaactttacctcccgaattcaagtgattctcttggctcagcctcctgagtagctgggactacaggcgtgcgccactgtgcccagctaatttttgcatttttagtagagacagggtttcaccatgttgtgcaggctagtctcaaactcctgacctcaggcaatccgcccgcctaggcctcccaaagtgctgggattacaggcgtgaaccactgctcccagcctaacttaggctatattttgtcttcccattttgaggacatgaatgcagaagaaattctctactgaaagaaagacaacaaacaagactaatgataagtgacaacggacagtgagtttcaatgacaaggatactagggactggtggatgggaagtgtgtgcatccaggacgcagccagtctcagcttctacttattgctgctcgatagaaatccaggcaggggctgccagatcttaagattcctggagagataccagtgatttctatttttatataaaacctatcaatttaaaagagttgactcattgaacaacgaaagtaacatgactatattccccaataaatatttgttcattgtagagcatcctcctttggtaataatttttaataaaacaaaaaacaaattttcttatatatcagttatatttataaatataattatataataataatcataagcattcttttagtccatttggtttactgtaacaaaataccttgcctggggaacttttgtttatttatttatttagagacggggtctctgttgcctaggttgaagtgcagtagtgtgatcgtggctcactgcatcctcgaccttgcaggctcaggtgatcctcccacctcagcctcccgagtagctgggactacacatgccaccatgcctagctaatttttgtacagacgaggttttgccatgtggcccaggctggtctcaaactcctgggctcaagggattcatctgccttggcctcccaaagtgctggaattataggagtgaggcactgtgcccagcttgggaaacttaccaatgacagaaatttattgttcacagttctagaagctgagaagtctaagatcaaggcacctgcacctgaatttgcaggtgtattcctcatagttggagctttctacctgtgcccttacctggtggaaggagcagacaagctcccatgggcctctctaatgtggacattcatccctcatgacctaatcatttctcaaagaccccatctcttaatactactgcattggggatcaggtagcaacatatgaatcttcagggggacacaaccttccagaccatagcaactgctatagcttcttctactattttctgttatttgtctttgcaaagaatagccccagactaacatgtttgttgagaacatatgtttgggggtttttttggtagtgtttttcagtcttggggaagctgctagcatttgctatttctgggaaattagaaagctatgtttggtaaaaccaaacttaaaatatgagaaaatgggctatgaatgaagatttgagaaaattttgagtaaaatgcataagccatgcatggattttgtaacatcggttttgactagggtgtgtatgtgtgtgtgtgtgtgtgtttttcttatttcttaattcatagccatgctatagatacttgaggttgctggataagcatcttttactgaagtgaagtattactgtacctaattttagaatatataattttaaggatgaatatttctattagattttgctttaatttctatgaatttaagcttctatttatagacaatgcaacaattgggtttttaagaaatcctcaaaaaacattctggaatgaactgtaaaatgtcccaattaaaatctgcttagtacccaacatgcaattgatttttttttttttttgagatgaagtcttgttttgtctccaggctggagtgcagtggcacgatcttggctcactgcaatctccgcctcctgggttcaagcgattctcctgcctcagccacccgagtagctgggactataggcacgcaccaccacgcccagctaatttttgtatttttagtagagatagggtttcaccatgttggccaggatggtctcgatctcttgacctcgtgatctgcccacctcggcctccaaaagtgctgggattacaggtgtgagccaccgcgcccagcccatgcaattgattattaacgcttttgatttacactcaatattttctgcttcgcttcctctcatcttccttctctcacttcctcttcctccctctgcatcttttctgcattacccctctccccaactttttggagaccaggaagaaaaacgaaacaagtatttcaacaaatgtctatgctgctgctgctgctaattgatgatgataatgatggtgatgatggtgatgataatggtgatgatggtgatgatgatggtgataatgataatgatggtgatgattatggtgatgatgatgatgatgacaacgatgataataatggtgatgattataatggtggctaacatttgttgagtgcttcccatgagccaggcactgttccgagtgctctaaagagaatatctcatgtaatccttacagaaccaaatgctgacagcatgacttgtcaaactacggacagaagtcatctcaggtagcatttactgtgaaaggattttggaagtacacaaacatgatggagaattaagtgctgccatttgagttttataaatgcaaaggccacagtttttggattttgagaggccggttcctaatagcagtgactcagcagtagagcctggagttgagcccaaatcccttgttcctcatcagggcccttttctacatcccttctaaaattaggctgaagttaaacttttagctagactgattgaggataattctcagaaacagtttcataacaatgagatcatggttatttgttattatttcctcaaatttttcttctacatcttaaaatactaccagcaaaatcagttctgggactaatcgtttaaaacatgatattttaactaatataaataaatgatacctaaaggtcttcattagatgaagtaaaataatcaatgctgaaattatgtaaaatatagtctattcagcatcaaatatttaataaacaatatcctttttaacagatacacacacacacatgcacacacacacacacacacacacgtttctccttttagtccttcttcctctttggtgtacctaaggatctaggacctagattttaactgcttttgtgtatatttgatatctttgcaaaattcctatttgtcacatatttgaaacttagaaacaaggtcaaggcctaactagacattccagttaataattttttggctcagggcaagttagttaagctgtttgggcctcaggttttccttcggaaaatagttgtaaaagcacctagtgtttgataggtaaaggtgggtgggagagactctaaataagacaatatgtatcaagtccctgactctttgtaagtgctcaataaatctcagccatgacaattcaaaacatcagaaagcaatatgtaactagaggttaggaaaatatgtcttgaactcacatttttttaacatgggttgtattttctgtgagcttaaataatgaagccatactttaaatagtgtttaagagcataggatttagagcctgaaacacctgtgtttaagtcctgtgtactagctgttttccccttgggcaagttccttaatttttggaatcacatttttccattttcaaattgggagtaataattagctcccctacaggattgtgataaggattaaataagtgaatgcatataaagcatgcagacagtttgcaggctgcagcaaacaataagtgctaaaaatgacctataatgttatcaatccctgatttagaagaagataatccatattttcaattaaccattgccgtgtaaccaacactacagcttaaaatacagcctaggagcatgcagcttgggcagaactcagcagggacagctgggctctgccatgtggtgtcagctggggtgattcttgcattcatctgggagtctgacttgaccagaacttctaggatgacttcatatccatgtgtgacccctcaactggagtgtctgaaaaggctgggattctctggccctctccagaagagtggctcagtacagcacaatggtacagtacaatgacagctcttttttccagggttggcactcttttttgacctacagacgtgtagattctttagaggtgtatttggcttctggactggcccttagattagagaagacctttctcacctcttttaagaaacagtttttttggtgccttcatcttcattttaatttacttattctattcactcaaaaaaaaataattcaacatacagtggtgaagaaactaaacaagttcttgccctcaaggagcttaaactctatgcaggagatagacaataaacatgtaggtaaataaagtaatttcaggttgccattggtgccaaggaggaaacaacaaggccggtgtcagagaataaccctacttataggtggaaagagaaatctcctctgaggaggtgatagttaagcatagtcatgatagaggaagaaggcctaatttcgacaagagctggggaatagggtcacagacagagtgaactgcatgtgctaaggccctgaggtgggaaaggcaaggacctgaaaggaggccagtgtggctggaacccaaaaggccactggagtatggcagaaagaaaaggtgctgccccagattatgaaggccaagaggtatctcagggtgcttggttttgattcagagtgcaatagacagccaatgaaggtttaagtagagaggtgacattttatattttgctaaaggttactttgccatgagcaaacacatacagtgttgagcttagtgaccttcccctgaacctcaggtagcatcaagattagtcactgatagtatcataaataagagatcttggctgggtgcagtggctcacgcttgtaatcccagcactttgggaggccgaggtgggtggatcactagaggccaggagtttgagaccagcctggccaacatggtgaaaccctgtctctactaaaaatacaaaaattagccggatctggtggcgcatgcctgtaatcccagctacacaggaggctgaggcaagagaatagcttgaaacctggaggcggaggttgcagtgagccaagatcgtggcactgcactccaacctggctgacaagagcaagaacctgtctccaaaaaacaacaacaaaaaaagggatcttattgctctgctcaaatgtctcatgagaacattttaagcagagcttatttttggcagaggttgctctcaggtaaatatggtcatttcttaaattttccagagtatcaccacagttggggcacctcattatgcattattataagtccttgtgaggattaaagagaatatatgtgaaatacctaggtgtgggccccatatatgtggtctacaatatgcaccctgtactatgcagcgctgcagccccgtgcccaacacctcagtgacaaagctgcatctgttctttctcttgccttgagggtgccttctagaccctgccctcatctcctttttttttttttttttttttgagacagagtctcattctgtcacccaggctggagtgcagtggcatgatctcagctcactgcaacctctgtcaccctggttcaagcgattctcctgccatggcctcctgagtagctgggattgcaggtgcgcaccacaacacccagctaatttttgtatttttagtacagatggggtttcaccatgttggccaggctggtcttgaactcccaacctcaagtgatctacctgcctcggcctcccaaagtgctgggattgcaggcgtgtaatcgtgtagcacaatatctaatgaggagtttgctaacacaatgctggttaagccacctactgtgaaaaggaaaatgaatcctagggctcagagtactgcgggggatcatttggtgttgctcccgtgaagcccaacccacccatcttctcttactttatggtttcttttttcaatgtatgttttttgttgtcaagttctcttttctaatccttaatttttcttacacccttgatctccattccttgggatttcatcttttatatgccccaaagaagttggaaaatattttcaccaaatatgtctttctgtggaagatagaggaatgtttcaaatatttactattttctttagtattaatgttccctgattctttcccagcatcattgctcacctgtacaactcttataggagctatcatgtattacttagctatggggccaggagagcccacgcagtgaagcaaaaaactggctgctactagcagatctaactggaaacattatctctatttatgtctgcctcttaagttgtctgcactttgtgtctggaatgaatggaaagaatattgattgcaaagttgtcctgagaattcactgatgggtaatctaagggtgtaagatcagaaatgttcatacataaactggttttataattcagtaatttgttttgcagtgtttatagctttgctgtcagctaagcgagctacagacaataataaaatgattcttatacttagcattagatagagctgttattatgacttatttctttgacaggttgaagtcgatcctattactaccttccctctgaagggcttgacacctctcacagagtatactattgctattttctccatctatgatgaaggacagtcagagcctctgactggagtttttaccaccggtaagcagcctcattatggtttgaaaagttttgagagtagctattaatatatagaaaccagaacctggagcaccttctttatttgtgattttgaagagattaaattttaatttttatttcttttatgttattaaaaaataaacaattggatgactattatgtgtagtggctaattattttttatcaaagcaaggaagagagagaaaagaccacctaaattcaaaaggtctgtttttaaaaaaatgtatgtttttctcttcctaatcttatatcttttactttcattccttagtgtaaaacttctacatccttcttccattcaaatgagtgtgtgtattaagttgaatttccaaaattgctgatctccaacagttttggcccacaaaaatgacagtctcatactatttagctcaatatatcagtcgatgattttccccgagcctgaaatcttcatataataataagtaatattttaaacactaaaattaaatataagacatgaatacattatttttcttttctatatgtaccctgtagccactttttatctcttggtggcaacaattctattatttgctttctgaacttatcatggattgcacttggaaacaaatgtagtctctactgaggagatgagacggtaatttggagacagatgaaaaagaagctggattgagaaataatgtttgtggaaaaattcagtaatttaaccaaatctccagaaggctaattctagttgggattctcatggtgtcctatcaaaaagttgggtttttatgtttttttttttgtttttaaactctgacttcaaataataaaaatcaattctttgataatttattttgggtgcagttgggtgttatactttctgttgtacatcccagaagtgtgtaagctctgaaacagtggaaggcctgataaattctatttcatttctgatgaccaccatatgtacaagttaaaagattgaagtttcttttccaggattaataccagggagcaatttagccactaaagcaaatagaactaaaagggaagctttcttaggcccctattttgttaatttcctcaagatacttggaaaataatatttaaaaaaaaaatgaatatggcactcttgttttttatagttaatgaaaacagccaaatagaaaagctaagagttttggaaattactggaaaagttttaagatctgttatttccatggtttccctaatttatgatattggtgaatgctggaaacagaaatggaaggccaccctggactgatgggccccagttttccttctttcctgtgctttcctaaagcaaaagattcctcaaagagtcttctacacccctgggagatacttgggttttggctttcttgccttctcatttccctaacaaaacctccttcctcggtttacagaggaagttccagcccagcaatacttagaaattgatgaggtgacgacagacagttttagggtgacctggcatcccctctcagctgatgaagggctacacaaattgatgtggattccagtctatggggggaagactgaggaggtgagttttctgaaacagactgaaaattaatctggagcattagtgaatacctactgctgctggagttggtcttcactttaaaatatattaggaatcccagaagtaattagtattttacatggcttggagttttagaaatgtcaaatcataagattttcctaatattatgatgtattgttgccagagctttagttatatatttatatattttcagattctttgactttaataaatgacatttaatacaactttaaaatgtcacttttgcaatattaataatttatttgctgaggggattgaaaggaataaagtctctggcttgaccttaaaatggacttcgacagccttggagttctttatgattggttgtttcttgcttatgctcagaataacactttttctttacttttttttcaaataagcatagttactaagcaccaaaatatatttcaggttgtcctgaaagaagagcaggactcacatgttattgaaggcctggagcccggtacggagtatgaagtttcactattggccgtacttgatgatggaagcgagagtgaggtggtgactgctgtcgggaccacacgtaagtcttggtctggccacagtgcgttttagctgctcccacaatccctctttaccccatcaatttccttccccatctgctttatctttggctatgtaagcttcaatttctctttgtcccccagaattcttcatatatcttcactttcaatgaaaccagtatgtgaagcatcttagcttcctagataatgatcaacatgaaggcagggaccatatctgtgttgctcaccattatattttccaggacttagcacagtacttggcacatgttaactgtagagtaaacacccatcaaatggatggatggatagatgaatggatgtatgcaagaatggataaaataatttacaaatgaatagattgccaaacaaataaacctagggccaacatgtcaaagagtttctggaattttccaagttgatattggttccaagagtcttgtacaaaatttacttgctgattcattcatctcttcatttttaaaatatgaggtattgaccacatattaaattgcctttgcctgggttccctggaaccagattctagacagaaattgcagccagaaagtttattgaagagtgcagttgggagatgcttacgtaaaaaactgaggacagcaggagggggcatgggaagaagttgaaactgaaccctcagctaatcttattataatggaggtctagtgctgggatgacccttctgagttgtcccaaattgagacaaaggggctgagacttcatacccttgcatccccagtcgctggaggtgagccattccctgacagaggccatgaactcaggcgagacagttcccagagctgtgaactgttggcaggcagtgttccagcaccaagtggattggtgtgttgaccctaaaaagaggatctgggaagagcaccacatctgtacttcattctgctatatgcccacggtggctgtaagaaatagaagatgcattgcttgtccaagcacattgcattccgtggtggtcctgtttggcagccttttcacaacttggtctacagcactgtctaatttcccttaattaccatggctgtgcccctatttcaaagtaattgggtggtttcacaattctgtagatgtagttcaaatgtttatatgaagcctggtatctgtgatgagaaactttaacattctttgggtttcagttttcttatctgtggcacaggtatgtctgccttacttacaattcatttctttcgtcttctaaccattgtcatgtttgttgtgggaggcaagtgagataatataggtgaaatgttctttgaaagctacaacatgctatagaaaaatggacagttgtttttgcagcattttaaagtaatatattgcttttagttgacagtttttggacagaaccagctacaaccatagtgcctaccacatctgtgacttcaggtaaggtcaaatagtagcctgcttaaccactttaaaaattttctttaaacagatgttatattatcctggttttatttattattaactaggaaaagagatgaccctcccttccttttctggcacactggttcaaatttcacgcctctcagagcctctcaacaccttccttgccactaaatgcccatggatctcctagtcaactgatctcactgatacatcactctacctctttcatctttgtctggatgctcatgcaccttacctgggatgttaacgtagctgcctccccaggggtctttgccctcctcttttttttttctttttattttattttattttattttatttattattattatactttaagttttagggtacatgtgcacaatttgcaggttagttacatatgtatacatgtgccatgctggtgcactgcacacactaactcgtcatctagcattaggtatatctcccaatgctatccctcccccctccccccaccccacaacagtccccagagtctgatgttccccttcctgtgtccatgtgttctcatcgttcagttcccacctatgagtgagaatatgtggtgtttggttttttgtccttgcgatagtttactgagaatgatgatttccaatttcatccatgtccctacaaaggacatgaactcatcatgttttatggctgcatagtattccatggtgtatatatgccacattttcttaatccagtctatcattgttggacatttgggttggttccaagtctttgctatcgtgaatagtgccacaataaacatacatgtgcacgtgtctttatagcagcatgatttatagtcctttgggtatatacccagtaatgggatggctgggtcaaatggtattgctagttctagatccctgaggaatcgccacactgtcttccacaatgattgaactagtttacagtcccaccaacagtgtaaaagtgttcctatttctccacatcctctccagcacctgttgtttcctgactttttaatgattgccattctaactggtgtgagatggtatctcattgtggttttgatttgcacttctgttgctctctgttgagaattccccttcttttctctttttttcttttagagacagggtttcattctgtcatccaggctggagtgcagcaccacgatcaaggctcaccacagccttgacttcctgggctcatgtgatcctccagcctcagccccccacgtagctgggactacagacatgtgtcatcgtgcctggctaatcgttttgaattttagtagagatgaggtctttccatattacccaggctggtctttaactcctgagctcaaatgttccttcatccttggcctcccaaagttctggaattgcaggcatgagccaccatgcctggccttgttgagaattattcttaccatgttttccttgcatttctgtgggtaactgacacttggctggtctattgtttttcctacattagttgtttcctctctcagcttagctttccccttcactgtaatacacctcccaactagctgtcagagtcaacttggtaaaacacaagtttgataatatcatttatttacttctctaagacacttcaatggctctccattacccatttgttgatttgttcattcttcatttaatccttatcaagccttctttgtgctttaaagtctttttcacagcatccaagatccttcctagttgggtcctgcttcccttcctggcctcaaccatatttcctatgcttcccccgtttttctcttgcaatcccgaactcctttccctaaatgtgagaagttccctcccattcccattgcctggtagcccccctgcaatgttgccaggtaaatgtcaaccccctcctcctctgtgacacttttactatttttgttgagttaataactatataaaaaccaaagccctaacagtctgacacacagaaaaagttcaatgaatattttctaaatgaattaatagatgaatgaagagaaaggagaatgagaaaagatggacaaagggaaatgaagttagggtagaagagaaaagaaaaaaatgcaacaaataagggagcaggcaccttgagagatgagcacgaatgtgccaggaaacacaggtaaaggagtttggacaagtaccagagaaaagatcgtgtctgtgtgggctgaatggataaaggcagcctgagcgcagatttgtgctttgaatgacaggtgttaaaagagaaatggaggtgagggcaggtgattgggatgtgtgttggatgctggattgcacacagaggtggacaaagtctggcccactgtgcccacttgtccacagagcactagtgtgaggttctcatgaccactctttcctttgggttccatgggctgtttttctagtctcagggcttcttcccagttctctttactagtgcacatacagaactgacagttttgagggctccatggtctcatcttgtaagcatctcttaattccacttttatttgctgctagtaggtatcatgcctccccattaagcaccatagctgagcccttcttgcctcatatacaactatattacagggatacattaaatgatgcttgctgtcaccccacaggtattctctgtggctcattttggaatatgatatgttaaaagttttttaatccttggttgtgtttattccagttttccagacgggaatcagaaacctagttgtaggtgatgaaactacttctagcctgcgggtaaaatgggacatttctgacagcgatgtgcagcagtttagggtgacctacatgacagctcaaggggaccctgaggaagaagtcataggaacggtctgtataaattcaactgactagaaactctgcagatgttactaacacagctaataagactgtcttcggagatcaatgcaaactttactgctcttttctcagtgactctgccatctccagaaactaatgttctctgttaatctgactccactactggcttcttagtgacctttataaatccaaaacttgctccatgtacaacttgctccaagttaataacctctgaacattgtttcaaatattgcttctcttctgctgccttgcacctgttcgagcaccaaagttgggtcataaaaggccatatgcacttgtgtctgtatatatgtatgtatagacatgtataaaagtttaatatagaaaataatttcttctgcccttggaaatctgataaaaaaacttttaagcaaaggacacagaaaaggtcttctatatggtatagtgaaaatattcttaataaaataccatccgttaaccaatagttatatttttcattgacatcaactcgtattgagtagatttatagtcatttctaattattcgtaacatggatgtatcccctcagggatttagatttttatacattgagttttctttgagttgttttatctatctttcctttttctaaatgatacactctttttttctaatttatttatctttttttaatatacttaagttctgggatacatgtgcagaacatgcaggttttttacataggtatacatggaccatggtagtttgctgcacccatcaacccgtcatctacattaagtatttctcctaatgctatccctccccttgccccacaaccccaacaggacccagtgtgtaatgttcccctccctgtgtccatgtgttctcattgttcaactcccacttatgagtgagaacatgtagtgtttggttgcctgttcctgtgttagtttgcagagaatgatggtttccagcttcatccatgtccctgcaaaggacatgaactcatccttttttatggctgcatagtattccatggtgtatatgtgccacattttctttatccagtctatcattgatgggcatttgggctggttccaagtctttgctattgtgagtagtgctgcaataaacatgtgtggatgtattgttatagtagaatgatttataatgctttgggtatacacccagtaatgggattgctgggtcaaatggtatttctagttctaggtctttgaggaatcgctacactgccttccacaatggttgagctaatttacagtctcaccaacagtgtaaaagtgttcctatttctccacatcctctctagcatctgttgtttcctgactttttaatgattgccgttctaactggcatgagatgatatctcattgtggttttgatttgagtttttctaatgaccaacgatgatgagctttttttcatatgtttgttggctgcataaatgtattcttttgagaaagtgactgttaatatccttctcccactttttgatggagttgtttgtttttttcttgtaaattggtttaagttccttgtaggttctggatattagccatttgtcagatgagtagattgcaaaaattttctcccattctgtaggttgcctgttcactctgatgatagtttctttagctgtgcagaagctctttagtttaattagatcccatttgtctattttggcttttgttgccattgcttttggtgttttagtcatgaagtctttgcccatgcctgtgtcctgaatggtattgcctaggttttcttccaggatttttatggttttatgtcttatgtttaaatctttaatccatcttttcatttttgaaacatgcggtgtttggttgcctgtttctttttttgtctaagattcatttttgtataaggtgtaagaaaggggtccaatttcagttttctgcctatgcctagccaggtttcccaacaccatttattaaatagggaatcccctccccattgcttgtttttttccaggtttgtcacagatagatggttgcagatgtgtggtgtcatttctgaggtctctgttctgttccattggtttatatatctgttttggtaccaataccaagctgttttggttactgtggccttggactatagttttaagtcaggtagtgtaatgcctccagctttgttctttttgcttaggattgtcttggctatatggactcttttttggttccatgtgaaatttaaagtagttttttctaattctgcgaaaaaagtcaatggtagcttgatgggaataacattgaatctacaaattactttgggcaatatggccatttttatgatattgattctagctatccatgagcatgaaatatttttccatttgtttgtgtcctctcttatttccttgagcagtggtttgagttctccttgaagaggtccttcacatcctttgtaagttggattcctaggtattttattccctttgtagcaattgtgaataggagttcgctcatgatttggctctctgtctattattggtgtatggaaatccttgtgatttttgcaattgattttgtatcctgagactttgctgaagttgcatatcagcttagggagatctggggctgagatgatggggttttctaaatatgcaatcatgtcatctgcaaacagagacaatttgactttctctcttcctatttgaataccctttatcactttctcttgcctgattgccctggccagaacctcgaatactatgttgaataggagtggtgagatagggcatccttgtcttgtgccgattttcaaagggaatgcttccagcttttgcccattcagtatgatattgactgtgggtttgtcataaatagctctttttattttgagatacattccatcaatacctagtttattaagagtttttagcatgaaggggtgttgaattttattgaaggccttttctgcatctattgagataatcatgtggtttttgtcattgattctgtttatgtgatgtattatatttattgatttgcgaatgttgaaccagccttgcatcccagggatgaagccgccttgattgtggtggataagctttttaatgtgttgctgaattcggtttgccagtattttattgaggattttcgcatcaatgttcatccagggtattggcctgaaatgttctttttttgttgtgtctctgccaggttttggtgtcagcatgatgctgacctaataaaaagacttaaggaggagtccctctttttctattgcttcgaatagttttagaaggaatggtaccagctcctctttttacctttgtcagaaattggctgtgaatccttctggtcctgggctttttttggttggtaggctattaattactgcctcaatttcagaacttgttattggtcttttcaggaattcgacttcttcctggtttagtcttgggagggtgtatgtgtccaggaatttatccatttcttctagattttctagtttatttgcatagtggtgtttatagtattctctgatggtagtttgtatttctgtgggatcaatagtgatatcccctttatcatttttattttttgttgagatggagtctcactctgttgcccaggctgggagagtagtggtgcaatcttggttcactgcaacctcctcctcctgggttccagcgattctcctgcctcagccttccgagttgctgggactacaggcacctcccaccatgcccggctaatttttgttttttttagtagagatgggttttcaccatgttggccaggctggtctcaaactcctgaccctgttatctgcctgccttggcctcccaaagtgctgggattacaggcatgcaccacccctgccccctttaccattttttattgtgtctacttgattcttctctcttttcttctttattagtctggctagtggtctatttatttttttaatcttttcaaaaaacaagctcctggattcactgattttttgaagggcttttcgtgtctctatctccttcagttctgctctgatcttagttatttcttgtcttctgctagcttttgaatttgtttgctcttggttctctagttctttaaactgtgatgttaggatgtcgattttggatctttccagctttctcctgtgggcatttagtgctgtaagtttccctctaaacactgctttagctgtgttccagagattctggtacattgtgtctttgttctcattggttccaaagaacatatttatttctgccttgattttgttatgtacccagtagtcattcaggagcaggttgttcagtttccatgtagttgtgcagttttgagtgagtttcttaatcctgagttctaatttgattgcactgtggcctgagactgtttgttatgatttgcattcttttacatttgctgaggagtgttttacttccaattgtgtggtgaattttagaataagtgtgatgtggtgctaagaagaatgtatattctgttggtttggagtggagagttctgtagatgtctattaggtcctcttggtccagagctgagttcaagtcctggatatccttggtaattttctgtctcatttatctgtctaatattgacagtggggtgttaaagtttcctactattattgtgtgggagtctaagtctctttgtaggtttctaagaatttgctttatgaatctgggtgctcctgtgttgggtgcatatatatttaggatagttagctcctcttgttgcattgatccctttaccattatgtaatgcccttctttgtcttttttgatctttgttggcttaaaatctgttttatcagagactaggattgcaacccctgctttttttttttgctttccatttgcttggtaaatattcctccatccctttattttgagtctatgtgtgtctttgcacgtgagatgggtctcctgaatacagcacaccagtgggtcttgacttttaaccaatttgccagtctgtgtcttttaattggggcatttagcccatttacatttaaggttaatattgttatgtgtgaattcgatcccgtcattatgatgctagctggttatttagcccattagttgatgcagtttcttcgtaatgtcaatggtctttgcaatttggtatgtttttgcagtggctggtaccggtttttactttccatatttgttacttcctccaggagctcttgtaaggcaggcctgggggtgaaaaaatccctcagcatttgcttgtctgtaaaggattttatttctccttcacttatgaagcttagtttggctggatatgaaattctgggttgaaaattcttttctttaagaatgttgaatgttggcccccacgctcttctggcttgtagagtttctgcagagagatccgctgttagaccgatgggcttccctttgtgggtagcccaacctttcgctctggctgcccttaacattttttccttcatttcaaccttggtgaatctgatgattggggttgctcttcttgaggagtatctttgtgatgttgtctgtatttcctgaatttgaatgttggcctgtcttgctaggttggggaagttctcctggataatatcctgaagtgtgttttccaacttcgttccattctccctgtcactttcaggtataccaatcaaacgcagatttggtcttttcacattgtcccatatttcttggaggctttgttcattccttttcattattttttctctaatcttgtcttcatgctttatttccttaagttgatcttcaatctctgatatcctttctttcacttgatcaatttggctattgatacctgtgtatgcttcacaaagttcttacgctgtgtttttcagctccatcaggtcatttatattcttctctaaactgattattctagttagcagttcctgtaagcttttatcaaggttcttagcttccttgcattgggttagaatatgctcctttagctcggaggagcttgttactgcttaccttctggagcctacttctgtcaattcattaaactcattctccttccagttttgttctcttgctggcgaggagttgcgatcctttggaggagaaggggcattctggtttttgaaactttcagcctttttatgttggtttttttctcatctttctggatttgtctacctttggtctttgatgttggtgacctttggatggggtttgagtggtcgtcctttttgttgatgttgatgctattgcttcctgttttttagttttccttctaacagtcaggcccctctgctgcaggtctgttggagtttggtggagggccattccagaccctgtgtgcctgggtatcatcagcagaggctgcagaaaagcaaagattgctgcctgctccttcctctggaagcttcatcccagaggggcacctgccagatgccagctggagctctcctgtatgaagtgtctgtcgactcctggtgtctccccatcaggaggcacgggggtcagggacccatttgaggagactgtctgtcccttagcagagttcgagcgctgtgctgggaggtcctctgctcttttcagagccagcaggcaggaatgtttaagtctgctgaagctgcgcccacagccaccccttcccccaggtgctctgtcacagggagatgagagttttatctagaaacccctgactggggctgctgcctttcttttagagatgccctgcccagagaggaggaatctagagaggcagtctggctacagtggttttgtggtgctgcggtaggctctgcccagtccaaacttccaggcagctttgtttacactgtgaggggaaaactgtctactcaagccttactaatggcggacacccctccccccaccaagctcgagcatcccaggttgacttcacattgctgtgctggcagcgagaatttcaagacagtggatcttagcttgttgggctccgtgggggttggatctgctgagcaagaccactgggatccctggcttcagccccctttccaggggagtgaatggttctgtctcgctggcattccaggcatcatggggtatgaaaataaactcttgcagctagctcggtgtttgcccagatggccacccagctttgtgcttgaaacccagggccctggtggtataggcacccaagggaatctcctggtctgtgggttgcaaagaccgtgggaaaagcatagtatctgggctggatagctctgtccctcatggcgtggtccctcatggcttcccttggctaggggagggagttccccaactctttgtgcttcctggatgaggcgacgtcccaccctgcttatgctcaccctccatgggctgcacccactgtctaaccagtcccaatgagatgaacccggtacctcagttggaaatacagaaatcacccgccttctgcattggtctcactgggagctgcagaccagagctgttcctatttggccatcttgcccaggcaccaaaatcaatgatacactcttaattgtggcctggtacacttttaatcatggccttcccatgtattctaaatttacactatatcattcctttcagtctagaacctgaaaattctttcttagacatgtttctaatcaaaccaggtaactccagtatgcatccagaagaatttttcttttgagtcataaaatatgtttatttagctcattacttgcatttcttgccctctgctgcattatttctgacactctgggaaagaagtctacaaaatttattattgctcaagtataacattatcattcctttgccttcctcactcaaaaagccttcaatgggaagttacttttatttatgtgcttacataaacaactatttgaccccagaatcctttaaggaaagtacttcatttctggctgatggaggaaatattacaggacacagtgacagacccaagaagagccacacctactgtgaatagccagaaggccattacactgatctgggagtacttttgaaaagttaatggattcttaaacaaaatagattgaattacaaattcactcagaccatacacttcaaatggttcatgattggcaaattcaaaaaataaaataaaattatggttaggaatggtaattaaatatataagttgtgatttttttttctgtgttatttttctcatattgtaattgagttcctaaaaatgagacccgtggaaacttcccaaggtgagaggctttgttttgttttgtttctgttttttgttttttttttgtttgtttgctttttgttttttactttttctgagaaatacattaagcttcttagtgaattattcctgttaatttggaaagaataaaaatttaatatcatgcatgcacttgtaagctatgcaaggtaaaataataataatatttactttgggttgtctctagataatttttccttttctagtttctttcgtttcacactgtttatttttgacatagttggacacctagatgaagggaaaaaaagatcaaaagtcttaaacactctgacccagttaaacaaacctgtagtaaaaacgaaaaatattgataaatttggtggtgcttatttgctttgcaaaactgtttttttttttctctctctctcttttgccttacagaagaacctactgtagaattctttaagtatcaagctcctttagaggattttaattaaataagatatgtacacacttgatttacaggtgccctctcagggactcacctgagggttctttgaaaatttgtatcagtgttttatgaagtgttactgtgatacaaatgtaatgtgttatgactggagacagaaagtggactgcatgtaaatttagattatgaaactaaggtggacaggcagatgcacatctctattaaagtctgagggtcttgaaatcacatggaccaaatgacatcttaaaataataatgtatggcgcagaaagacagatggctaagacatactatgaaagcaagaaaggaaatgtgtcaagataagaggaataccagaccttccttaactctcaaggctgattaaatttacacaaagaaatgataagcttgtgtactgaagttggacaatagtgtatgtatatgttatacactgtgtactataacattgtagaccaaatttcagcttaaacatatgtaaaacaaggggaatttaatttacgtttccagttgaggtaaatgaaatgtttctatactttctagatataattacatctatcaaatacttctaggttaaaaaaaaccctttgaattcttagaaataaaactatagtacctgtcaaatattttgtaaggattgactttcaactctgtcttggaatatggaggagtggcaatgacattgccatacattttgttgtcagggtaggaaggtctctcatttattttaaaaggctagtcaggatttcagaattttctagagcctcagtgtaaaaatctgtagctctaacatgaattctgggttgcaagaatacgtctagagtaagaatactcaaagtgtgactcagtctcctacatgactgcatgatagtttcagatattaagattaacattttagaaacattgatagccatttgacattactgcaacaacctgagaacatgatcacttttctaaccacttggttttatcgtattttacaaataaattggtctgcaatggatgggaattaaaatgacaccaccaccaccaacaatagcaactagtccttcaccacaaagagtttgagaatcactgcctagaactgaacttcataagaggggaacacagcgagatgcagggcatcctctttctactgcaggaacagctggttggatatggtccaggttgctctgaaaagctttgggtgatattagagccagacatgaaaatccatttctgaaaaaaattaaaagcatgaagctcactggttatatttccatcccacttaaccatgaacattttttacagaactgttttataaataaaaccagcatctgttctgacctgcagcatttgtttttagtaggagcacatttttttactttgctttgtctaaacaagcagaggccaagcaagaggaactttgcatacccaagaggagatggttttttactcttgaaaatgaatatcaatagggtaagaaggttcaagtggtgcagtcatgtggagtagaggacaaaggcccagacaagattcttggggtttcggtatggctcttttactcaatatctatatgggcctcagttttctcatctgtaaaatgaatgtgatgataccccttatttcaaaaggtggtagtgaagattaagtgaattacagattgagaattcctaatcataaaattcaaaatctgaaatgctccaaaatccaaaacgttttgaacactgacatgatgctacaagtggaaaatttcacatagaagtaattaacacaaactttgttttacgcacaaaattattaaaaatattgtataaaattaccttcagattatgtatataaagtgtatatgaaatgtaaatgaatattgtgtttagacttgggtctaatcctcaagatacctcattatacatctacaaatattcctgaatctaacaaaatttcaaatccaaaacacttctggtctcaagcatttctgataagggttactcaatctgcatatgctgtattagaatgcttacagcagcacctggcacatagtaattgctaggtaagggaagcctcttactataaatcacagcaactattcctggcaagctaatgagtcttctaaaacagtcacactgctttttagtattccatgtgctaaatttaattggttagttccaagaccatgggcttctcagtttgaaagaagacattatttaacatcaacatgggtggtttgttagatggacaaattgaaatgaatgcccaggctctgcttcagaggggttacatttaagagaaacaccctgagggaagctatgttggtggagtaatgcaagtcagggcaacctcaattcttctcttacacgttcttagtgctagggccgtctaactcattctggaataaagcagagcttctttgtaaatatctccttctcaggaccccgagtccacacatcaattcagacctgtacatttcaatggccctttcctatgaggagcaaaatcatattaatctcatataaaaatcatctaatttagatttccttgtttcatatttaaaatactgcttttaagggcttagcaatatcttagcaacagctgcttctgggttcaactcgaggctttctagggcttattccatgatttataggttccttccttcatccagaaggagacagcatcgccctttgcctgctggcattttacccagcacttgaatcgaaaagtaactccagctgtcctggtcttgtgactcccttaaacccgtttgagtcagttcttacatcctagcacttttccagccatgattaagttctttaaatggcccggtgatgggccagcttctcactcctggagcacagacagaaagttttgtggttttagcactgagaacatgtggcttttctggtccagacgattcttttcgaggtggcagagttcacaagccaccacatggagccctgcactcacacttgcgcgatgtcgaacccactgctgcatttcttttttgtggggacagccttttagacacagagtgatggtgattctagattgaggaagacaactcctttcagaaataaaaaagctgcaccgttttttagtgttgctggtaaatatgcttcagctcaagaaaacttggctttgatgtgtggttctgttgctcttggctaggatccatcctttctaactgaaagaagaaaatgctggggtctgattatctctgaaggaggaaataatggaaggctgactttgcaagaggatacttaagtaaaataaaaaatgataagcagcaggctggattatagaatgagctctcccaatctataaacacctgctatctaaacaggccattattctctcttctggatactttacaaatgccaagaagatgttgagagaagaatattccttagagcttaagagtgtcaaatttaaaccttctgtattagtgattataaactaagggttactgtgatgggaatttcagggagaaacgcttttgcatgagtgccctttcttttctcctcactctcaaagcacatctcttttcttttgattatttcaaaatgcataaagttatgctccattaccaaatcagtggaaacgggtctcactaagactgcagtcctttgcttttttgttcaggttatggtgcctggaagccagaacaacctccttctgaagcctctgcttcctgatactgaatacaaagtcacagtgactcccatctacacggatggcgaaggcgtcagcgtctccgctcctggaaaaacctgtaagtgaagctttctccctttgaatacaagccgactcattaaatggaaatgcttgtcccctgtaatgcaccctgaaagatacagtagattgcagtgaagaaactaaaagatttgggaacaggaaatctgtctgcatcctgtctttacacacacaagctatgtgactttgagcaaattgcttaaatgttctgggctgcagtttctttttctgtggaagtgaagacttgaaaaacaactacatctttctcttccagagtttaattcgtcaaggtcctgtgattcatcaaaatgtattctgcatgcctgatctctcttcatctaacaggtgtgctctagtccaagccacactctctcttttattttcattttatttaattaatttacttttatttccataggttttggggaacaggtggtatttggttacatgagtaattctttagtggtgatttgtgatattttggtgcactcatcacccgagcagtatacactgaacccaattggtagtctcttatccctcatccccttcccaccctttcccctggagtccccaaagtccattgtatccttcttatggctttgtatcttcatagcttatctcccacttataagtgagaacatatgatgtttggttttccatttctgagttacttcacttaaaataagtctccaatctcatccaggttgctgcaaatgccattaattcattcccttttatgcaagccactctctctctcatccagatgagtgtactagcctcctgtcaggtcttcctgcttctactcatgccatctcctattcttcttatagcagcttgaggaggttttcagcagataaatgatctgcacctctgttttaggcctcccaatggcttctcactgtacccaggatgaaatcttatgtccttccgtgccttacaaagatcaacctaccacctggatcctgccgatctctttgatctcccctcctggccatttccccattcatacctccctgtctgctctccactggactctttgaagttgttcctgccttaggccccatgccctagcgattccttctacatggtatatgctttcccagatatttgcatgtaagagtttttctggtcatccgggtctaggctcaatgtcacctcctcagccttttctggccaccccatgcaaagtagcccccactgtctatgatattatccttttttgtttgttgtttttggtcatatcatggcactaattactccctggtattttcttatttattcatgtatttgctcactttctgtctcccatccctggaaggcaaagtatcatgagagcctggggcctcatcaatactgttcacctctgcatgccaagctcctatagtgctgggtggcacagaggaggcgtcatgcaacgcttatttaagatggattgaccatgttcctcaaatgagaaagatgcatgaaaacccttggttaaagcactgcagagtcatagttgtcttcattattgatatgattttctattcttgcataaagactgctctagaacttaatggcttaaaacagtgaccatttttttttatcatatctcacaattgtttgggtcaggaaattaggcaggacttgctgggaaagtctgctccacatgggattgatcagtgtcacctggtggtattcacttgagggctgggctggtctggatgttacaggacaactttacccacatgtctggcatcttggtgggggtggcaagcaggctggacccagctgagtgcctctctctctcccttagtctcagagcttctccatgtggtctttccagcagagcagtcatatttcttacatgtcagctcaggactgtaacagcaagagttccaagaggcataaaatggaaactgctagtgtcacttctgctgcagtctatttattggtcaaggtagtcatagaacccactcagatccaaataaacagtcatagtgccacctgtcaatggaaggagggttgaaaactctgtgaccatctttatccatcataattaccaaatggtgacatgtggttaggttcaaaatggtgtcaagggctgaattatgtacctgggcaccgaagtgtggagttttcaactaagtttgcgaaaatcattaaaattctgaagcccagagtcctgattctgctcagctgggcaaataggtatcatctcctcatttaacagtgctggcatctctccctcctcccgtgcttatgccgtgtgcctccacccagactcccaccaagcctgcacattttgctaaaaatcacccagagtattgtgagtccttggagctgctatagttgtttcctcaagggacatgaggaaggagagaaggaaaacagaagagcagagctatagggagatttcaaacttttcactccacctttaccagtatattggcatcttgatttggtctatgcattggaatttctagcatatgttggtatgttgctgctaaataaatgtttgaaaaccaaaatcacagacttaagcaacaattaaagaaaacatcaagtagtattttacctagcgaggtaaatacttgctattatgtatttatctttaaataaaaactatttaaagattattagtatgaaaatagggcttaaatcttattacagaaatgccattacgtcttaaaaatctctatatagtaaaattattttgaagtgttagtggatgatctaagcagtgattaaggagtggccaacacaactacgttttatcaacaacaaaatgataatgacaaaatgcatacaaatttacaacagtcctccatataaatgactgtaatgttttgataaaaatggataagcaataatataaaacttcaaacagtataggaaatatgaagatgaaagcaaaaaataaaatcagaatcttacctctgagaataatcaccattaacattctatgaacacacccccagtattgctgttcacatatgcttagtggaacacagtggcatggagacagacatttctaataaacacgattgaattcaattatacctaaaattaactgatgaatagggaatcaaaataacaatgaaagacttctacatttcagataaaagtattttgttctaagagcaattatttcccatatatttaatattgaaggctgggcatggtggctcacgcctgtaatcccagcactttgggaggccaaggagaatggatcacaaggtcaggagatcaagaccatcttggctaacatggtgaaaccctatctctactaaaaatacaaaaaattagccagacgtggtggtacgtgcctgtagtccaagctacttgggaggctgaggcaggagaattacttgaatccaggaggtggaggttgcagtgagcggagatcgtgccactgcactccagcctgggtgacagagtgagactctgtctcaaaaaagaaaaaaaaaaattgaaaacaaccacagactctcaaaggcttctcattgtgtgtttcagtgcactttcacttttaaatatttttaattttgtgggaagatgtcttatattttgatggcatcagtgtaggacataaagaaggaaattacactgaatccctgtttttccttttcttttctactcagtaccatcctcggggccccagaacttgcgggtgtccgaggaatggtataaccggttgcgcattacgtgggaccccccatcttccccggtgaaaggctatagaattgtctacaaacctgtcagtggtaagtaatgctttgtaaataatgttgataccatgagtagtcacttaaaatgtcttttaagataaattgttttcttataacaccttatgtttggttgtatttttttaaagaagtagggagaacctcttacttgttttggaaaaataaagtgttttagtatggtcagtgatagggtagatattatcaggatgatgaagctatgacatcacataaaaaactactgggcacatcaattagaagactatatattgggtatatacatgacctaatcataccctagaccaggaaccaatctaaggaaatcttgactttataggaataggaagctttatgctcaataaagacataaattctaaacatttggaatctctaacttcaaagttctcttctacctcttacttcttggattagttggaaaattttcatttaccaacttcttagtctcctcagtttggaaatggaatagggggaagaaaaaaaaaactcatcacggtagtaaaatgcttttccaccagtctcttagccacctccataagaggatccctctcgcctctacctcccacatcattatatcttgaaggcatgaaaatgatacaagtagaaagcgatcgtacccttggtctgtatgcctgtgaagaggagaccgtatgccccagcacctcttacagtaccatctccccattcttagcaatctcacaaagtttaaacaggagactagaattgatgttattaaggtcttctcagttttctagacctgggcctgcagtactctagttgttcagcagaaagggcaggaaaattttaaaaacattcttacggtcattaaaacattttctgctggctgggtgtggtggctcatgcctgtaatctcagccctttgggaggctgaggagggtggattgcttgagtccaggagtttgagaccagcctgggcaacatggtgtgacccagtctctacaaaaatacaaaaattagccaggcatggtggcatgcaccgtacccccagctacctgggaggttgaggtgggaaaattgcctgagccagataagtcaaggctgcagtgagctgtgatcacaccactgcactccagcctgggcaacaaagcaagaccctgtctcaaaaaataaaaataaaatataagcactttctgccttcaaaaactccattagtttcaatctttcttttttttttttttttttttttttttgagacggagtctcgctctgtcacccaggctggagtacagtggcgcagcctcggctcactgcaagctccgcctcccgggttcacgccattctcctgcctcagcttctccgagtagctgggactacaggcgcccgccaccacgcccggctaattttttttttttttttttagtagagacggggtttcaccgtggtctcgatctcctgacctcgtgatccacccgcctcggcctcccaaagtgctgggattacaagcgtgagccaccgcgcccggcctagtttcaatctttcatctgagatatggttctcgccccatatcaattttcagccttttctattgtgcctcattatccaggtgctattgtcttcaggcccgtaagactcaaatactcccacctccaatttctccagacaaacatccttataactaggaaaataaaacagtaagactagaacatgggtgcactagcctgctccaggctcattctctgggacccatcaccaatgtttttgtctgtttgctttaggccggaagcatgcgttaatttgtaagacagccttgcttaatttgttttttggatcattttacaaatattgatcaggctttctaagcacaaaaagctttattttaggccagcggttctcagttgatgtcatttgctcccaaacggagacatttttgattgttacaactggtgagagaggacttgctcctggaatctaatgggcactcctaaacatgctacaatggacagtactcctctgccccagaataaataatttttcagttcaaaataccaatagtagtgaggctgagaaatcctgttctaggccaagtgggagaaatatacatgtatggtcatttgcattgtacgtgtggggcatgggaaaattgctactgaggtaacacatacagagatagacatataaatgtattgttggaagggggcttctggaggaaagtgatgagtattttgagaacttgtcactaactcaaagctcttaaagaatgagcatgcatgggaagaagcaggaggtaaataaatttgtataggctttagcaatgaatgtttttaatgcttcattaaagaccccactagattgaagaagaggtgaaaacatacagacctgaaaatgctagctaatcaagggccttggaataagagcataatctgtctggtattaaacatcctaaaaggagcagataaaaataaagtggtaacattgatgctggttcacaatgtggcaaggtatggcctggtctccatgataaaatttgctatgactgccgcttgtgtgcctgctgggagcaaagttggttaccttagaagggacaattgagaattatttctttaattggactaattcctcaattgcctattacaacatagtacataacaatatagcagatggtagactgtgaggtggaccaatttctttgaataagtacaaggataaaactatatttagggaaatgactaggtccctaaaaataacctttagcccagcagtttttagagctagatgagaccagattcaaacctcaaccctgctgtctgcttgctgtataatcccaggcaactgaaaagcagtcaagtgaatacaatttgatctaagagtgcttctattttcccatattttgttgtaactaaaatatatcctctttcttctttagttcctggtccaacactggaaacgtttgtgggagctgacattaacaccatccttatcacaaacctcctcagcggaatggactacaatgtgaagatatttgcctcccaggcctcaggcttcagcgacgccctgacaggcatggtgaaaacatgtaagagccatttccgatggcctcagccgcatatgggtttttgttttgttttgttttttgagatggagtctcgctctgtcgctcaggctggagtgcgctggtgcgatctggactcactgaaacatccgcctccagggttcaagtgattctcctgcctcagcctctcgagtagctgggattacaggcacaagacaccatgcccagttaattttcatatttttagtagagatggggtttcaccatgttggccaggttggtctcaatctcttgaccccgtgattcaacctcctcagcctcccaagcacatggggttttgctgctttgttttcactgtaactttcactcaaccctgcttccatttggtcattcatttttccttttcctctgcattgccctttctggatggtgtttcatggaaagaaaggtgtgctttttatttggggtagttcagagtcctggttggcaggcgggatgtcagtacctggctttcaaatagacttgatgattgcagataggatttccttctggaaaatctgtgttggcatttttcaaattaggtgaaattttccaaacagcctgtagcccgagatggccaatgtcaaagttggagcaggaggaggtttgtcttttctcagaggggtcactccacccccttgcacgtgcacatatgccatccatcaaaagtacatgccaccccattctcagcacttccttctctactcctttgagggttttcacgttgtctgcacaccatctgggactccttagtggcatacaccactcccagacacccacacaataatgcaatgttttccaaattccagcacctgtgtgccatattcctgaagtttgttatacctccgcatgatctgtttatttatttggattgacttacagtttttgacctaaatacttttcaaaatccatgtagttaccctaaacagaaaatcagtatttttattttttaatatattaaaaaatattttctcctctactagctttttagttaaatatccaaattttcatagataccctagagatttcaatatgaatccttagcttattccagtctaccttaaattactgctttttggcttaagaattttataacaatgtataatacctttttcctttttgctactctttttctatctattttgtaactctattgctataaaccccttaagatattattgttgttgtttcaaatactcactattctttcattttttttctagctttattgaggtataattggcaaataaaaattgtatatattcaaggtgtagatacatagatctgcaatcttcaatgtgatgatttatgtttacaatgtgtaatgatcaccacaatcaaattatttttgaagtatacattttattttcttttttgatagtcaaatgacatctttattttattttatttattttaaaaacttcaatatcccttagggtacaaggggtttttggttacacggataaattctctagtggtgaattctgagattttagtgcacccgtcactggagcactgtatactgtacccaatacatagtctgttatccctcaccccgcttccaaacctcccgtctttagtccccaaagtccattatatcactcaaaatttttaatcacattttaaaatacacattaaagacaacatataaatgaccaaaatacaagtggtttggctgtatgctagtctagatagtcctgagtgcaatcaacagcacatgccccactcttgagatcatagtcatggtattgtcaaaagaataagcctcaaatctgctacttgttagtgtggccttgggcaaattgcttaacttccctcagcccaagctttttcaattctaaaatgaagataataataaccatcgttcaggcaaattgtgaggattacagagaaaaaatgtatgtaacgtgcttacgatgtggcaaatattcaataaataactactattattattgtaatgatggggctttatgcacttgccctatatcttaccctcatccctaaaaaataattaatctaatcaatactgtcaagcaagagtgggccatatattaagccagaccccagcgccccccgattgcatatagggccagcccttttatagaagaggtgtcctgaactctctgtcgtggaatatcttgagaccttaaaggctagacagtgaataaatttatcttaaaagaaatagtctccatcttcaacaggcctaggaagcctttggttggggttctgatcttgtgcttggctgttgatgtgacactgttgtggcttcactaatgaaacctccaagtatttcctctgttttgctcctatggcaacttcacagccttccttagttataccacagcatctcctatagctgggattacaagcgtgtgccaccatgcatggctaattttctatttttagtaaagacagggtttcaccatgttggtcaagctggtcttgaactcctgacctcaggtgatccacctgacttggcctctcaaagtgctgggattacaggcgtgagccactacgcccagccctgtgattttttactggtctctcttctccctagtctttcttgtctttttccatcctcttttctctgctccctcttcaattctgtttcctctttcttctctcccttaataaatatattgagcattccaaacatattttaaaagactgagattgttgaattgttttatagtcttgtccttaaaatataaattagtgagtttattatttattctctctatttctcccaagcaaaagaaaatctcccacaatggcaaataaattaatataaggtattttaaaaatattttgtgtggttacataaatcattaacattgataaaagttatataaatcagggccgggtgcagtggctcacgcctgtaatcccagcactttgggaggctgaggcaggtggatcacctgaggtcaggagtttgagaccagcctggccagcatggtgaaaccctgtctctactaaaaatataaaagttagtcgggtgtggcggcatgcacctgtaatcccagctactcaggaggctgaggcaggagaatcgcctgtacccaggaggtggaggttgaagtgagctgagattgtgccactgcactccagccagggtgacaagagcgagactccatctcaaaaaacaaaacaaaaaagttatataaatcaattaacattaatttcatttgtttttgttaggggaagagagattgtttaattggctttaggaaaaaagtcttctttctttgctgtaacagaaaggaacagtgtaaatgtataaattatagttagacaagattatttttaccatcttgaaaagataattccgaggtatttttattttgtgagtaagctaagagagagagagaaataatagaaaatgatatgaatggaagtcagaggtcattaggaaaagtaaatatgttgattttctgcttggatccaaatgataaacactggctacctacttttctattgtcttgtagaaacaatatcttattgcctccccaaacaacaatttttgcatatcacaatgtctaagattaataggaacctatgtattttaaaaataatttgtgttatctctgtaaaatcttttatttttaaattttcaaaagtgtttattcaatcgtgttttgaagaccagtccttgtgaaactgctcctgtttgcagaacccttccattttgactattttactcttctctttttaagccatggctatcccattggttgataaatacatactgtatttacttttttattatacaagtattacatatttattgtgtaatatttagaaaacacaagtatataaagggggtaagatttaaaattacccaacatttcatcatcctttgcatctggtcttttttctatcaatatgcacttcctcttctatttaaaatgcatacagggccaggtatagtggctcacacctgtaatcccagcactttgggaggctgaggcaggcaggtggcttgagctcaggagtttgagaccagcctgagcaacatggcgaaacactgcctctacaaaaaaaaaaaaaaaaaaaaattagctgcatgtggtggcacatgcctgtgatcccaactacttggaaggctgaggtgggaggattgctggagcccaggaggttgaggttacagtgagatgagatcatgccactgcactccagcctgggctacagagcaagaccccatctcaaaacaaacaaacaacaaacaaataagaaaaatagcagacagaccacatcatgcataatgttttgcaatctgttctctcaagtcataaaacatttatcttttgtatactaactcattgtaaattgatggatttcccagctctgactatgcagctttgaatgaaaatttttccagaagttaatttcagattcagggatgcttgtgtgttgtctgcggtgtgatacagttatgtttctatttcattccagtgttcttgggtgttaccaatctccaagccaaacatgttgaaatgaccagcttgtgtgcccactggcaggtacatcgccatgccacagcctatagggttgttatagaatccctccagggtgagtacaatccatcacttacgtttttgtcaagcatttgtgtatttgattctttgcacaccactgtgtacaacacacaagtagcattagacaacagccctcttgtcaaggaagcaatttgtattggtcagtcatgctgcatatggggtctgactggttgggtaagtgaattactaaccctctggaaacctccctttttcttatctggtaatgagtatagccatagtgctgattttttagagttctgtgaagataaagctgagatattccacataaagcacttgcagtagtgctttgtgcactggaaggaccccaaaaatgttagcagccagatagccaagactagcatacattaaaattatattgtactctaatttgggtattcactctctagggatcaagtttaaatttaatgtttttcttagtgtttttttttttcttttggggataattggtgaacaacaaccctcattccagagatttaatgtatctacagcatcatgaacaagttcttcagcattacagttctcatgtacatccacaatttgggacttgttccaaggctgaaacagtaaaaatgtctcactgtcttcattaaaaatatcgagaacaacaacaaatggctgattccccaaaaatcagtatctagagccggttaatcctcttttcccaacatcagcatggacactatgcagaagatgaaatcaaataataaaaattacttaatcagatttatagaaacaatagaaaagctatatcttattattttatgggattataggagatgctaaagaatcccaaatgattttttaaaatcttccaaacttgggagtaaaattgttaaaaatgtagcctgttctttctgggcaaatgatcttggtttccccatttcagaaaagcaaaatgacctaattatttctagtccagataagactgggtttagtagcccatattcctgactatagctatattcaaaatccataaatcccatttttgatccaatccataaagtggaaagcatagtttaggagagcactgagagcatttggaaatatgtcccttgtagaataagaactgagatacgtggaacatacgagaagaaattcctgccaatcccagccaagatatcatcatgatagacatgtggcaccactgcttccttgagtccctctctatgatgtaaggatccttccagcctgacattggcttgacatttgggagtggtattaacctggaacaaacattgagggatagaaagtgaggataagtcacatggattttatggttatgttaaatatgatttatgggatgccaaaagtagataaagcacaggcaacaatttgagaaacaactatgaaatcttgagttatgtttcctatatttctttaagtcacgctttaatatggaagggttggcatttaatggtatttgctaagcctaagaaaaaattctaagtgtaataatcaccctcccaaactatcccacagttcttttatatgatttatccttttatatgatttaggaaattgaaatgaaggaacgtgggttcctgtggatattcgttgcctttcataaaaatttatcactatatatgttgacacaacgatgtataaaaactggctttatcaatggaatcaataagattcatagttttttaaattaaatgcttttagtttagcatatttgcaaagcagccttgagagttttatcagaggatatgattgatttgtctgataatactgaactggtcatctaaaaccacaataagctctttctgaagccaagatctttgctggcaagtaaatgagtccacagttgctttttatcttcaagttaagtgaacttatactccctcagtattattttcaggctgccagaaactttttcagctgaacctttatagtcttaattgaacaagaacgaacaaaagtgttgttcaatgtacttctcatcaacatttgttgctgagagattagatttgtgaacaaaattagccacatttcattcacacagttgtcttactgaatattatttatcaactggacagcaaaagattctaattgacaactggaaaaggaatgtttgatggaggagtgagtgtgggggtggcagtaggaaatgtgtttggatagtttaactcatacaaattagatcaaggaatagtcttcctactttggaatggagaagaattaggttgagtttcattatcttataggggaatgtgttcaccattctgattcactgactttaaaggacttgtggtaagatgcccattcttccacaggcagatgagtctcagaccctcaggtgttttgactgtaatattggctacatatgcggtctctgcagaaatttcagtctttccactccaggcaaaggagatactaggaataaatgagacccaatttccccatgtgttggaatgaagctttatcccagttgacctctttctgaatgcctccgtcaaatccttacagtttgatgggtaattttttccagtttttttcccatatattttttcatagcttaagcatgtgcacttttattctgagattaagtcagtaatgaagtctctactgtaaccacaaccgctggtcaactttcttctctgggcttcagcttctgtgaaattatttcatctaagtctattaactgaggcaataactgcaattttgcaaggtttttgtgagtagaatagccacgttgtatcattcaggcttgtttattaatattcacagaaatctagataaacttaagccgaagggtcaatttattggctagtatactgagaagtccaaaagtctctggcttcaggcacatctggacctaggtgttcaatttcctagagataaagtcttgctccttcttgtgttctgctcttctatgccttcattttcaaccaggctcagtgagtcagatccagaattacattctcccagcttccagctttaacagtcttggtgaaaagagagcttctctttctcaatagttccaacagaagtccaggaactgagtcatattggcctggtttgggtcacatgcctctaaatctgtcattgagtgcaagggcatgaaataaactgactgtttggacctggttgccttccacccctgtatctggtggtggtggctggaggtgggggtgttattcaatcctccccaaaccataaagaccaagactgaggaggaatggatgcaaagaaagagatttcagatacaagacaggcaaaagcaacagatgtcctttacccatgtaaatattatgacatttttatggccaagaaaaaaaaaagattaccagaaggacaaagtcttctcaggaaagactgaaataaaatctgcttttgactcagtcatccatttgccaaattaaatgataggtttttggttaattctaggacagcccaaagtgagagatttttggttggccttgggtaattcagagccctgtgaggtcctccattagttctgcagatgctatgggattttatccctctctccagctgtttttgagttgccttggcacctaaggttgacttcaaattcatgcatttattaatatatgccacataggcccaaacactttattcccaccctaatccccacaacttgatgaacttctttgtaacctgcttagataaaggtttagaggatgctccacttgtccctatttaggtgctgagatgtcagctttgcagtattatttattgacaaggatagagaactgcagcatagtggagagcctaccttaccaaagaccaggtccacagaaagcatcatatggaacaaaacctatgatcagaattaaactttctgaagcagtgacattatggggagtataattatttatatcataaaattctaccagagtagttacctggatgctggatattctttgcttgtggaactcaataactacttgtaggacattttgataagtcaagctggtggcgttataattataattatacgtttataatctggagaatggatttagtgttgcttcctaagaatgagtgcacaaataaagacagattttttccctgtgtttcaaaaaaataaattaacttcctccttttggcatgagaggttgaggaaattagtcaccatttggtcagtttgaatgttttccttaaggcaaagccaataggcctgaattgcacatgccaaaagcaacatggatacacccccattcatggaacccctctttgttagtattgggaaccaaattgatactgtttgccattaatcttatagtgcttgttccagttttccaatgtttatagatttattattttagcagtaagatctacttatattctgttttcaagggtctttaaagtccatgggtttctacatgaaataggaaatgtgacagaaaagtgcatttctagaattgactcctggagagtccccggaaggtttgtggaggtagatcagtatgatccacgcataaaattcaggaaatgtttgtattacaggtggctcacagaagcttttaggaggctctaagggatagctaagggtcaaaaagaaacagttattgtgggattcagagcctggaaaccatagactaaacttggacctaagcaaagcgaaacactgagttgactaaattttacttactatcaaacccatttcacataatatataatctcacaaacactttaacaatttttaaatgttatcatttttcataatataggaacaagaaatgattaaagttgacactatttactttgaacaaatacattaataaaaattctgttataaagttcccttctgaaactaatattcacaatatataaaaatgaatttaaaattctatttaacaaatagctttaattcatttatatttttaaaagtctatatttgtccatagacaaaatttaaaataacatatatcatgtttattctgatatatgcatattataatatacatatctttgcttcaatatatgcatatcaaaatatggatggcaatttaactaggtttgatgcttataaaatagacaaaaattgtgtaaaatttttgcattttacagttgaaaaagcaactggtatgcttttatatattgtagattctgtttattcttcataaactcctctgcaaataacattttgaaggagcggatagttctttttaaccactaaatgatatgtgtaatatatttaatcaatgcagtttttaaacactagtttttcagcccctagaaataaagcgttatgaggctttgattaaacaaatgcaatttatggataagatgatcaatctagagggaaatttgaataattgttttttcatggtagcagtgattcctcctcttaatcagttgtccattgtggtaaaaacaacaacaatgctctgtgcctacgaggaaaacacttgaaactcttcaataatgaaagccacccaagtaggctctgtggagtgataaagcatcatctaatctctagccatcatgtttgtacattttatatgcactcaacagctctcagatggtttcattttggaaaactatatatttcatttacatttgcttagaatatatcagtggaaattaaagcaacgtcctctgaaactgagctttagagttctgaatgcagggggatgagcagaagtgggtcaaggggtagaataatacagttaggtagaaggagtaagttttagtgtttgatagtacactagggaaataatagttaacaacaactgtatatttcaaaatagctggaaaaaaagaattgtaatattcccaacacaaagaaaagataaatgtttgaagtgatggatattccaattacctgatttgatcattgtacattgtatagaggtatgaaaatatcacacaaacccccaaaatatgtacaactattatctaccagtttaaacaatctcagttctgctaattagaataaggacttgaagaagttattaacttttctgacctttagtttcttctctttaaattgggaataattataaatgttataagaatcaaatgagataatacatatgaattccttagaatattgcctggcacatgataagcactcattaaatgttggctattattatctttattgctgttgttataattaaatagcaagcacagaacctggatataataaaccctcaagaaatgatgaatataattaatccagattcctcagtctcaggacctaagggccagcactagttcttccaggagatgtacagcaatttttctatggatgtgggaacaaagaaacgagccaatagttagtcaggtctccagagttctttgtgcctctgtcatggtggagaaaaagacagagaaggtgccatatgaattggctgtgtatgacatgtctccttggtagataaaaaaagaaccagaaattgagactgaactctacagcatatatggccctatgctatgtaagcaccatgtcccttttcctcaattaaaggattttcagagtggatgcagggcatttggagaggcccctctgaactccctgggaatgtcttttgcaattgaaggaaaccactggtatcagttaaaagtcaaggctgagagggagatactgggcagggtgaggactccttggtggtcccagtgctgctgcaagctcttgcctgctgttgtggcagctttgaagacaacctggacccatggaccagggcttctgagacccatacctgtatctttagaccactgcctagaagggtggtctgttgggtggtaataagttatatgaggccaaaaggaagtatctgtttatgttatataacattgggctgtgttcagaaaatcatatcgaataaaagggagttcagatttaaaaaaaataggccaggcatggtatctcgtgcctgtaatcccagcactttcagaggctgaggcgggtggatcatctaaggtcaggaattcgagaccagcctggccaacatggtgaaactgcatctctattaaaaatacacaaattagctgggcatggtggtgcacgcctgtagttccagctactcaggaggctgaggcaggcgcattgcttgaacccgggagtagaggttgcaatgagctgagatcgcaccattgcactccagcctggatgacagagtgggactccatctcagaaaaaaaacaaaaacaaaaacaaaaaaaccccacaaagattaaaaaactaaataaatgccctcacatctgcatctgtccaaaagatcagttaggatgtgtgcatataattacatgcattaatagttctccattaagtaaagagttgatttcagaagtcttttaatagtaaacttcatttttggacatataaaatgtgattttccatagaaaaataccagtgaatatattaactctttggaagaagatacaatacttcaaacaaatataactcattctggagttatctgatgtgggctaacatgtgaagtattttagaagcaaatcatctgccaatggctgtgtttcaaaaatttcatatgtgtgtgtttttgttttgttttgtttttattatagataggcaaaagcaagaatccactgtgggtggagggacaaccaggcattgcttctatggacttcagcctgattctgaatataaaatcagtgtttatacaaagctccaggagattgaaggacctagtgtgagcataatggaaaaaacacgtaagtcatgtgtgttctctcctgatccctctccccatgaacaaacagaatttcaggcatcctgtttccttatcccatttagaaaaatattagctattgctgttcaggaatatacgtaatacaagttttgttcctcttactcaaccccagaattcattgcatatggcccactgatgtcatcaatatgggttttttatttccattctccatatatgtttcacaagagactagaaggccacacgatagtaaagcagttgagacaatgacttacattgtgatccagatccataaggaacatttgtggcatgtggagtgtgaaatgcagtttgaggacgacttggctctgacattaaaacaatggcatattaccacagccatgaggatgggaagggagccaagatgttccaactggatgaccctagagttactgcttgcctaagaagctcttgcactttttccaagctgactgcagatgtgatgcactaaagggaaaggcaaagtataaaattaaaacaaagctctttttacatgttccaaagagcaaggagagtgtcaacttcttgaaatggcttctagtcaaagattcttgaccccggctccacaaacattaaaatggtttgaaatgcagtgaattctgggggacatttgtgtgcttaactcagtatgttgaatttaaacttgaaattccgggaggatttgtgtctgaataggtgttgggcaatgggctttcttggtgacccgtctatcatgtacatggcatttagaagggattactatctgtgtatagctcttccagcctctctggcacttgcagagggaaatcatgcacatgtaaccttcaaaaagagaggataaaagtataataaattaaatcatcttcttttacgtaatacaaagactttatttcacaacacttaaatatgcagtatttcatattccacatgtatttttgaggtataatttatataacataaaatttaagtaccattttaagtgtgcagttcaataatttttagtacatgtaatgagttgtatcagcatccctacaatccaatttcaggacgtttccatcaacccaaagaacatttcctgctatttgaagtcgatctcctttcccaccctgagcctcagacaatctactttcttttattatacatttgccttttctggacatttcacataagtggaaatatatcatatgtagtcttttacatctggcatctttcacttagcatatgtttttgtggtttatccatgttgtagattgtgtcagtagtttgtttctttttattgctgattagaattccatcttatggattgtaaatcatatagttttgaagttaataggaacctgatagtacacaagacttagagtcaaatggtttgtttgaagatcttgttctgcccctttctagcattatggctttaggcgattcagcatctctgagcttttcactcatcaataaaattaaatacctactctcttgcctcaagtggtggcagtaaacaaccaataaaagaatactcattgaagagcttttcaacccatatgtcatctagcaagtactttttgtcattaccattattattttcttaaaggtcataaactaaaggctagatctcactatcaggcatgttttctccagccatacttttttaagttttaaagtagtttttgaaaagtcagaatatcttgcagcactaagtatctatcttcatggtgccaatctgctggaaccaactaaatgctgtctgtttagacagtgcatgtgcgcttaagttggctaccacaccttaatgttcacgctaagttctttgcgcttattcgttgctcacctgacccctagaaacatttgtgtttaggacccctgatctactttagcttctcctatccttgaccccgcactggttaactgctaacctagggttaaatccaatttggatagctctgtttgatgtaaatgttttccttatgttggaggcatctgtcttcttgtagcttccacccattggttctggttcaaccttctgaagcaatgcaggtaaagactattccctctttatatgacagcccctcacatccttgaagacagggacaatctgtatgccacatatagaatataaacatgtgtccccagttcactgtggttcttcttacccaagagattctttagccagatgttctgcccaatcgtattaatctggctgccatactctcttactgatttcattcttgatttattgaccagacttaggagatgccttgattttccatgttaaagaagatgcacaattattaagatgactgactacttccacaaattttaaaatttaaaaaatggctttagaaacattttgtggggttttaaagaaagttttgcaatcctagttacaaaaaaaatttctcattttttaaatttggagagtttttagcttcaaaaattgcctttaaaaataacagtgatatatatccataatagtaaaacagaaatgtataaagtgcattgtcaacctccctctttccttgttcttccttttcagaaatatttccttttcacacacacatatatatacatatttatgaaaaataaaaagcacatatatataaaataaaaaaggtatatatatgtgtgtgtgtgtgtgtatgtgtgcgtaagttttatttttcacaaatgagattatgccatggtattctgtgacttgtttatttcacaaaataatcatcttgaatatttttccatttagtaatatatagttacctcattcttttaatgttgaatccttttatttaaattattttattttattgaaccttaaagttggaagagaccttacagctcacctcttagccttcctgacaatgaagaaactaaactcccctttataaaattcttggcaaatagtcagtctgcctgagctcaaatccttctagctatttggtgcttagtatcgcctgaggctagacatcccctctgtgaatggctatgtttagtggagggttttcctgagtattaaactgggatagcgagaagaattttcttagtttttcttaaatctttagtgtcaaataagaattagaaatgaatacgtaataacatcgtattttatgtttacctaatgacatcaaaacttcctgatgctttgccacatgagctggaatgagaattgataatcactactctgatctaactgtccccagatcctttaaccaagccatacctctgcagagtatgtggacttctcatcccacataatccaggctgaaaagacccaaacacactttagcctgccaatgtttacatttggtcctcaaaaccaaaagacatttccagatgcagtctgagcagagcagaatgaatcagagtccactggtgaccagtatcctgggggatgcaggatggaaagggaaaagtgctattgagcaaggattgatggtgaatccttaggcagaatggaaatgaagtttattgtgtgtgtgaaagcaacaggagacgaactttcaaatgggttggcaggattcctgccttaaatcaacattagaaccactttgtagttgacagtttgatttcattgactcctgctgggtaaactgaatggtggcaaaatggcatttcaagccttcagtctgaggatgagacgatggatggagtcagttttcacaggctgcggctgatttatagtactcattaaattctcagagaagacagttgtcaaaatcattgactaccctgaatatttattactccatgaccttccgctcttccccacagatgagatggtgaactgatgtcctttctccctttcctttacagaatcacttcctacacgaccaccaacttttcctccaaccattccaccagcaaaagaaggtaaaagaataatagaataattatctgattctaggtttaggatttgtgttggttttgtttgcctgttcatttcaaaccaggatattaataaagtatatttattgtgctacctaattttctccttaatacaaatgcttatcaaccatgatgggcttgaatgatatccatttaatatcaattctgcacacaaagagtggatttactaacagaattgcttaatactattttttttgaaatatcagagcagttaacattcattaaggaagcatagttacataatttgtaagtgaaaatccagtttgtagttcctcagatacagtaatagtttcccagcctacctctgaagtgtctctttcagtcgttttttctttcctcatcacaacagttcctcatcaccttttacctaagccattaaggtaactttaaaaaggccctcaacaaagtagtgatcattatttttttatttcaataatgaacatttattaatcctgctatttattctcaaggctcttatagtaggcatgggaaatacaataataatacatgattgctgctctctgcttatttttagtattaaagagaaataggtgcttgcctagataaataccagtcaagtttatgagttataaaatagcagttgtattatgtaccacccagaagtggtaatggttaatactgctgcagattaatgactcataaggaagaggcatttgatctacattttgaagaatgagtttgagagacaggtattgggatgaatagcactcggtgtcaagagtgatccaactgcttaatggatttagtgaaccataaatgctttagtgtggcaagaaagagaaaagaatgacagtagagttatggagtggttaatgtgacaaaattaggaatttgggctttatcctgtgggaaatggcatgttgtgagaatttgtaagaaggaagggcgatctgatgaaatctatgtttaagaatgataactttggtgaaatagggaggatggactagaagaatgagaggagaaagtagaacacattagaaggttgtattggaagagctcttccattcacaatgcatcttaaagtgcctgttacataccagggaaacaataaaaaataagttgttgagagcttaaagccagtagattcaaatgctgcagagagtagaagacacaaataaacagaggcaattaagaactctaataaagctcaacattcatcctaggatggcatgcagagtcttcacaaatcaatctactttgcagtattatttcccagaatacattatataatagcaaaattgtacaactcagggctccccatacatgtcttatgctgtatctttgaaagctattcactctacctggaatgccaaattctttcttcttccagcttcatatctagccttctttagtctcaacatctgtggttattctcactattggaactagaaacagaatcctaattgataaatttactaattaggcacttctgatgcagatattacagaatgctctgtaatatctgcatcagatcagagtatttttatttatagctgagtatggatattattccgtaaacattcatgaatgcttatagaagacttatgtgatctggaagggtctgtggggttaaggattgacaaagtagaaacattggttctgagattttcatcatgatggtttagatggtgcttttgcaacttgaatgcactgtgtattttaggctttgtttgtcctgggtatatttaatttaaaagccaataaatttgtattattaaagtaatactaaatatttattaaacgaacattaaaacgtagaaaaaacttaaaagaacagcattaaaaacacagctttctaccccagaggtaactccttcatgcatgtggatatattttctttctttgatttactaactattcattttgagtgtattttttaatagaatttgctctcattttgaaagtgaaacctaattttcatttttatctttccatggaaacagagaacctgtttataaactcataattagcagatcttgttattcctttcagctttaagttcaaaccacaaatttgtaaaattttataaatcgcagaactcaaccttatcagatccttactgcccctaaagtattagctcacttggagatggtttattttatattataaatagctttaagggaatgaagttgtacttcataaaataaaaactaagtgaggtttttcttaaagaaaggagaaaggcacattatctcatagaatatttatgtgcaattggcctaagattaaaagattcagactattgaagagcaaattgtttgcttcatcataaaacagattcaactgcaatgatcagccctaatgaagaggaggagaggcatagataatctgaaatagcacatgataccaaaaaagaacttttaaaaaatgttctcagtagagtaggtttttattggtgtagtttgctttgtttaattctttttgcttgtttgattgctttgttgatatctgtaatacctactgataatactttcccttggctagcattagtgtacatttcttgacatatatcagtgggctatagaaggacagagacaaaaatttgttttaaccaagattagaatttgtttgcttagggcctcagcccaagtgaatatcaaattataattagattaatctggttccattttatcacatgcttttctgctgaaattgaatctctctgacattaacttactaattcaataagaaaaggacagggtgcacagagtgatagtatgtccttttttccaatcagttggcactagacagtgtttgctgatacttcgatctctgaatccctgtagtcccatcttttcctagtccttcattttcattcttttgggctgtggttggtggacagttttttctttctctatttccacacggataatagaagcttcttagtcatgaataagaaccttgagtataaaagagtaattacagcaaagaagcatagtgagcaggagtttggaatatgaacattaagaagtttatatctttcctttgaaaaagagcttcacttagcagagggcaaccattatttgtcttattggtttaataactactaacttttccccttatctctgactcaaaattcattgttggtcttcagtatgtaaggcggccaaggctgacctggtatttatggtggatggatcctggagcattggagatgaaaatttcaataagatcatcagctttctatacagcactgttggagccctgaacaagattggcacagatggaacccaagtaaggctaataaataattaattcattctatgtatttagaaattatttctccagctcttattacagctacttgtcagggactataggtcaagaactgtaatgattgggttcaaccttaaatgaaaggatagacaggtatgtgtttggaagcagcttgttgatgcctggcaaagctccagaggatgcttatccttaaaaggtgttgagttcggcaaactaaaacaaggtagaaagtccatgtcagggtgttatttttacatactagggtagaatgtctcctttaatgatacatacaatattttccctgcccttaagcactttaaaatcttgaaaggaaaaggttaaggtcacaccttactatagatcatgtggaacatgaaactaactcattcatttaaaaaatatgtatcaaggatttattatggccatgtactatactgtcataatgaatgtcaatcaatgtctctaattttgtggggctcatattcttaaaagtaaggacagaagacataccagtcagaatggctattattaaaaaggcaaaaaataacagatgctggcaagattgtggagaaaagggaacacttacacatcgttggcagaaacgtaaattaattcagccattagataaagcactttgacagtttctcaaagaacttaaaacagaattcccaaacccagaaatcccactgttggatatatacccaaaggaatataaatcattctactgtaaagacacatgcatgcacatgtatgttcattgtggcagtattcacaatagcagacatgatattaacctaaatgcccatcaatagtagactggataaagaaaatgtggtacatatacatcatggaatattatgcaacaataaaaaagaatgagctcatgtcctttgcagcaacatggatgaagctagaggccattatcctaagcaaactaatgcataaacagaaaaccaaatactgcatgttcccacttataagtgggagctaaacatcgagtacatgtagacacaaagaagggaagagcaaacaccagggcctacttgtgggtggagggtaggaggatagtgaggatcgaaaaattacctgtcaggtaacatgctgaatatctggatgataaaataatctgtgcatcatatcccatgacttgcaatttatctctctaacaaacctgcacatgttcccctaaacctaaaagaaaagttaaaaaaaaaaacaagagaaaagggacagagacagatataaacaggcaagcaaatagattcacaaggtagggatgtaagctatgaaaacagagtgatgtgatttaaagatgtcaggggattactctaaattgtgtgtgacagttattttaaattgtatggtaagcaaagacctctttgaggaggtgccttttgaactgagatgtgaatgatgcagacttaaagatctgagaatagaatttccagacagagaaaatgataagtacagaggacccaaggtgagaatgagttttgaaacttcatacaccaaaacttgtggctagaatatagtaggtgagagtgtgaggatagaacaagtggaagaagcaggcaaaagccagatcatcttgagtcttgtggaccatcaaaggagttgagtattatcataaatgcaactggaagtcactggaaggttttaaggagagccaagatctgatatgtttcagaaaaaaagattaccccaactgctttgtggcatgtgaattactaataagaataagagtgcaagcagatagaccagtcaggaagatgctctcatggtccagcagagtgatcatggtggcctggactagggtggtagcaatgaggtacactgaaacaaatggatttggaatatattgtgaaagaatggctaagaaaatgtgggcacaagaagtaccgtaagaggataatggatattttgcagaaaccttacaagacaggagagattagggtcctatttttagcctccttaaacaaaataactgtcagccaagaattctgaatccagcaaaactaagttttataaatggaggaaaaataaagtcattttcaggcaaacaaatggtgagagaatttgtcactaccagaccagccctataagaaatgttaaaagaagttctaaatttggaaacaaaaggttgatatacatcagaatataacctcttgaaagcataaaactcatagggcctataaaacaataacacaatgaagaaaacaaagtacttaggtaacaacatggtgactggaactgtacctcacatctcaatattaacgttgaatgtaaatagcctaagtgctccacttaaaagatgcagattagaagaatggatacaaaatcacaaaccaaatatctgctatctttaagagactcacctaacatgtaaggatttgtataaactcaaagtaaaggggtaaaagaagatattccatgcaaatggaaacccaaagcaagcaggagtagcaattcttatgtcagataaaacagactttaaagcaacaatagtagaaaaaaaagacaaagaaagtcattatataatgataaaaggattgatccaacaagaagatattacaatcctacatttatatggacttaactctggagctcccagattcagaaaacaattactgctagacctaagaagtaagacaacaacacaataatagtggggaactttaacactccactagcagcactagacagataatcaagacagagaatcaacaaagaagcaatggtctcaaactacactctagaacaaatggacctaacatgtatttacagaagattctatacaagaagtgcagaatatacattcttcacatcagcatatggaacattttccaagctagaccatgataggccacaaaacaagtctcaataaatttttaaaaatcaaagtcatatcaggcatcttctcagaccacaatggaataaaactagaaatcaactccaaaaggaatcctcaaaagtatacaaatacttggaaattaaaccatttgctcctgaatgatttttgggttaataataaaatcaagaaggaaatttaaaaattatttggaatgaaagataatacttacacaagttgtcaaaacctctgacatacagtaaaagcagttctaagaggaaaatatatagcactcaatgcctacatcaaaaagtctgaaaaagcacaaattggcaacctaatgtcacacctcaaggaactagtgaaacaagaacaaaccaaagccaaagctagcagaagaaaagaaataacaaaaatcagagcagaactaaatgaaattgaaacaaaaagcaataaaaaagatcaatgaaacaaaaaattggttctttgaaaagataaacaaaattgatagaccattagctggtttaaccaagaaaaaagagagaaggttcaaatagtctcaattagaaatgaaaatagagacattacaaccaacaccacagaaatgcaaaagattattcaagactattatgaacacctctatacatagaaactacaaaatctgaaggaaatggataaattcctggaaacaacaacccccctagattaaatcaagaataagccctgagcagaccaacaacaggcagtgagattgcatcagtgattttaaaacagttttccaaaaaaaaaaaaaggcccagggccagatggattcacagatgaatactaccagacattcaaagaagaattggtaccaattgtatggaaactattaggttggtgcaaaccacaactacttttgcaccaacctaatattctaaaagattagaaggggaattctcactaaatctttttgtgaagccagtattacctgatacaaaaaccagtagaggacataatgaaaaagaaaattacatgccaacatcccttgtgaacatagacgcaaaaataatcaacaaaatactagctaaacaaatccaacaacacatcaagaagataatacgctgtgatcaggtggatgtcatcccagggacacagagagggcttaacatacacaagtcaataaatgtgatacatcacataaacagaattaataacaaaaaccatatgttcatctcatagatgcagaaagcattcaataaaatccagcatccctttatgataaatactttcaacaaattgggaatagaaaggacatacctcaaaataataaatgctatatatagcaacctcacagccaaaatcatactgaatggaaaaaagttgatagcattccttctgagaactggaacaagacaaagatactcattttcaccgcttctattcaagatagtactggaagtcctagccagagcaatcaggcaagagaaaataataaagggcatccaaactggaaaagaagaagttaaactattactgtgtgccaatgatatgatcatatacctagagaacttaaagacttctccaaaagactcctagatttgataaacaaattcagtaaactcttaggttacaaatcaatgtatacaaatcagtagcactgctatacaccaacgatcaattctgagataagagataaggcctgaggatcaaatcaagaacataatcacttttacaatagctgcaaaaaaaatagacatacctaggcatatattatacttaactaaagagatggaaattctcttcaacaagaatcacaaaacactgctaagagaaatcagagatgacacaaacaaatggaagcatcccatgctcatggattgaaataattcttatgaaaatgatcatatttcccaaagcaatctacagattcaatgcaattcctatacaaatatcaacatcgtttttcacagaattagaaaaaaaatcctgaaattcatatggaacccaaaaagagcccaaatagccaaagcactcctaaacaaaaagaaaaaaatctggaggcatcacattacctgacttcaaagtatactacaagaccatagttactaaaacagcatgatactgatataaaaataagcacataaactaatggaacagaagagagaacccagaaataaagtcaaatacatacaaccaactgatcttggacaaaacattcaaaaacataaattggggaaatgacaccctatttaataaatggcactgggaaaactggatagccacatgtagaatgaaactggatccctacctctcaccttatacaaaaatcaactcaagatggatcaaagccttaaatctaagacctgaaatgataaaaattctaggagataacctgcgaaaaactcttctggacattgacctggcaaggaatttatgactaagactccaaaagcaaattcaacaaaaacaaaaataaataaatggtacctaattaaactaaaaaccttctgaacagctaatcatcagagtaaacagaaaacacaagaatgggagaaaatatttgcaaactatgcatctgacaaagaactaatatccagaatctacaagaaacacacacaaatcagcaagaaaaaaacaaatatctcatcaaaaaatgggaaaatggcatgaataaacatttctcaaaagaagatacacaaatggcccacaaacatatggaaaaatgctcaacatcactaatcatcatggaaatgcagattaaaaccacaatgagatacctccttgcccctgtaagaatggccattattataagtcaaaaaacaatagatgtcggtgtggatgtggtgaaaaggaaatatttatacactgctggtgggcatgtaatttagtataacctctatggaaaacagtgtggagatttcttaaagaactaaaagtagatttacctttggttccagcaatcccagtactggctatctacccaaaggaaaagaagtcattatgtcaaaagacaccagtaaacatatgtttattttagcacaattcacaaatgcaaagatatagaaccaacttcagtgcctgtcatccaatgagtaaagacaatgttatatatatatgtaaaaaaatatattatatatatattttacacaaacacacaccatggaatactactcagccataaaaaagaacaaagtaatgtactttgcagcagcttgaatggaggccattattctaagtgaagtaattcaggaatggaaaatcaaataccgtatgttctcacttttaagcgagagctaagctgtagctacacaaaggaacacagggtggtataatggacttggagactcagagtggggagggtggaaggtggatgaaggataaaaaaactacatactagatagaatgtacactacttgggtgatgggtgcactaaaatctcaaaccttgccactatacaattcaaccatgtaaccaaatacccttgtactccaaaagtattgtaaataaaaataggttccccaccctgtgtccaagtgttctcattgttcaattcccacctatgagtgagaacatgcagtgtctggttttctgtccttgtgatagtttgctcagaatgctggtttccagtttcatccatgtcccttcaaaggacatgaactcatccttttttatggctgcatggtgggggtaagggggagggatagcattaggagatatacctaatgtaaatgacgagttaatgggtgcagcacaccaacatggcacatgtatacatatgtaacaaaccttcacattgtgcacaggtaccctagaacttaaagtataataataaaaaaaaataaaataaaattaggttattaaaaaagaggagaataggtaacatgctgaggcatgtcagaaagaagcaagttccctttgaattgcaggagactttataaaaatggtgacatgtccagtagactgataaactggcagcagcttaaggcccatttaaacaaagctctcgaaagatgctatctttacttattaaatcataattctgaaaaacaaataaaaaacaattaaaaatgatccaaaagttccacaggaataaaagccagttgtaagaactgaagccagaaagctttgtatagtagtggttaagaacatacattttgacctagaatagacctaacttcaactgttgactctgccagtgaccactcttgtgatgtgcaagtaacttgtcttttgcagctcagtttcctcaagtgtaaagtgagtagaatagtagtaattacttcataggtttgcttcataaggaaatctttgtaaagagtctaactctgattttcggacatttgtcaagttaccaagcttaggctgccatttttaaactgtcaaatgaggtggcaaaaatcctacaagcttgaaagatttttaaaaaactactttctgaaagtactgagagacacatgcactcctatgttcattgcagcactattcacagtaacaaacatggaatgcccatcaatggtggactgcgtaaagaaaatgtggtgaacatacagcaagaaatactacgcagccataaaaaagaacaaaatcatgttctttgcagcaacacgggtgcctctggaagccattatcttgtgcaaattaacacagaaacatgaaaccaaatactgcatgctctcacttagaagtgggagctaaacatcgagtacacacggacgtaaagacgggaacaatagacactaggggctactagtagggggagaatagaaggaggctgaaggttgaaaaactgcctattgggaactatgctcactacctgggggacagaatcatttgtacaccacctctcagtgacatgccgtttacccatgtaacaaacctacacaatgtaccctctgaatctaaaataaaatttttaaaaaagaaaagatgtatttaatttgtcttcaaatttggtatgtaacttgtatgaaagaaattttaatccaagcagattttgtaatgagataatgaagaaattaaaactacaggtgacactgtgctgttgctctctgacccagtggaagtctacatatgtgtgaaaatgaatacaccttctctctccaggttgcaatggttcagttcactgatgatcccagaacagaatttaaactaaatgcttacaaaaccaaagagactcttcttgatgcaattaaacacatttcatacaaaggaggaaatacaaaaacaggtatgaccaaaagaagcccagctaaggctcaaagtaattcattatttgtaactactgaaatgaccttttattttaaggcatagtaattttttaaagattttttttttcattaatttaagaactttgttcccaccctttcttctccagaaaaacaaaaatgggagggagtgaaatcaaactgttgcctttctttgtttcaggaaaagcaattaagtatgttcgagataccttgttcactgcagagtcaggtacaagaaggggcatcccaaaggttatcgtggttataactgatggaagatcacaagatgatgtgaacaaaatctccagggagatgcaattagatggtaagatatataaacaatagtggctaccaaatatgatgttagaattgttattttctaaatacaaatttataggctatatcagcattacttaaatgttttaaaatatttcttcatattaactagacagtgtaatttttaaaatactttctggtatacaaatctgtaattgtactgctttgttagagaaaataggttattttctctaacacttttgttacatacaggatgccctttatatggaactctagcaattaagtactgtaagaaaaggaccagggaaagaatcttattacagaaactcctcagcctcttaatcatacccaaatgtccatcgatgacagactggataaagaaaatgtggcacatataagccatggaatactatgcagccataaaaaagaatgagttcatgtcctttgcagggaaatggatgaagctggaaaccatcatcctcagcaaactaacacaggaacagaaaactaaacaccacatgttctcactcataagtgggagctgaacaatgagaacacatggacacagggaggggaacatcacacacgggggcctgtcgggggtggggggcaagggagggagagcattaagacaaatacctaatgcatgcagggcttaaaacctagatgacaggttgataggtgcagtaaaccaccatggcacacgtatacctatgtaaaaaacctgcatcttcagcacgtgtatcccagaatttaaagtaaaattgtgtaaaaaagaaaaaatattgattgaatgtatatatatatatatggaccagggaaggaaccttattacagaaattcctcagcctcttaatctgtaaaatagagattctcacaggactgctgtgaagattaaattacataagttatggcaaatagtagttctatttacttgccaagcattgaatggtggcccaccttaggttgctaggcctattaatgtctcagcttctacttctgaaaaaaaaaaaaaaaactgagataagctcagtgtctctgtttcaagtatatttcataccataaatgttaaaagtaacttttaagaatatgcaaccatagagatattactcaaatgcaaactacttcgtctcaggcacaatttggggccttggtcttcttgggtttctttaaaatggaaaatctctttaggggatgatggaatcattatcacataatgaaatatatacatgcagaactctgatgaactgtaaagaatgaattatccacccccatgggccttcctaaataaacatattttaaacagttggatgtgtcttatattacattatttgtgttttgtacaatttaaagtaatcggaaatctgttctctgtctgccacaggctatagcatttttgcaattggtgtggccgatgcagattactcggagttggttagcattggcagtaagcccagcgcacgccatgtcttctttgtggatgactttgacgcctttaagaaaatcgaagatgagttaattacttttgtctgcgaaacagcatcagcaagttagttctttggaatttgtacttactcatgttgcttaacagctgaaatatttgacactggttaaatagtgagtccgatctagatctgagaaaagaatattgacttccagtactgcttgttatatagacattaagttttgtggctttgagcatatggaaataaacctcccctcctctgtttagagtttagaatgataaaaaccttccctaatcagatgacagtctatgtttaaaagcaactgtgcttaaacagatgtagtaaataattttcaatgtattaagaatgtattaagatgtaaaatgtattaagaattctcatctgggcaacatattacaagggagatgtgccccaatacatgctctcaggtgataaccactgattttaatgaacccaggagagaaggaagctgtggtcctttagttgtaataagggaccttagcacatttcaatcttcatgaaaccacagaaaaccatagtcacatttgatttgtattctctccacaatcaacttctggaaagattgtattagtttcctgttctcaggacagggaaagagtatgtttgtgaaatatccgaattagagttttattttgtttgtttggttttccagcctgtccagtggtacacaaggatggcattgatcttgcaggtatgcattatcacaatcttttcaaacacaaaatatattacaggcctctcaattggggatggggtttctgtttttgtttttaaatccttaatagaaaaatattaaaatttaaaattctaaagtgccatattccttatgtttattctttttctactttttttttttttttaggatttaagatgatggaaatgtttggtttggttgaaaaagatttttcatcagtggaaggggtttctatggagcctggtaccttcaatgtgtttccatgttaccaactccataaagatgccctggtttcccagccaaccaggtatgtttctgttgaaagattttaaagtcatcgtatgtttattatatctcactgtgaaaatgatgtcaacttgaaatatggtgtaatagtcccaggtaggattttccacgacatttagagtagaagatatttacatttctttgtttaaaaacaccagactcacacataatgcgggttgaactttaacatctgctgatctgagacaacatataaaaatgattgctggatgctgtggctcattcctgtaatcgtaacactttgggaggccaaggtgggaggatcacttgaggccaaaagtttgagagcagcctgggcaacaaaataagagtctctacaaaaacataaaaataaaaaaattagctgggcattgtagtgtgcacctgtagtcccagctactctggagactgaggtgggaggattgcttgagctcaggaggttgaagctgcagtgtgccatgatcacgccactgcacctcaatcttggtgaaagagcaagaccccgtctttaaaaaaaaaaaaaaaaagttgatacttatatagcactactcccagccatctttctaaatgcttatgtacactaactcactcaaacctccagacacctctatgaaagtagattctattattatctaaattttacagataatgaatcagaaacacaaagaagctaaatgacttgagtgagctcacatagttaaatggcaatgttggaatttatatccagctatcaagctccagtgctcagatcctgaaccatttcatgatagtgctatatggttcaaatggcttttatctttgagacagtcacaacagcaactctagaaagttgaagagtagtaatcaggtttatataaaaattgcattacttagctactttatagacacatttgccttattcttgtttctttttttttattatactttaagttttagggtacatgtgcacattgtgcagtttagttacatatgtatacatgtgccatgctggtgcgctgcacccactaacttgtcacttggaaccaacccaaatgtccaacaatgatagactggattaagaaaatgtggcacatatacaccatggaatactatgcagccataaaaaatgatgagttcatgtcctttgtagggacatggatgaaattggaaatcatcattctcagtaaactatcgcaagaacaaaaaagccttattcttgtttctatctctggatccccagcaaattagatggtgtctgtccacattgaaggcagatctgccccacctagctcactcagactcgcacgctaatatcctctggagacaccctcactgatatactccaaaataatgctttaccaggtttctagatattccttaatccggtcaagttgaaacctaaaattttccatcacaggacctttgtcagtttatttgctgatgtatcttaaatgtctgttacaatgtctggcatatagttggcactcaaaaatacttattgaatggacaaatgaattaatgaatatataaataaatgaatatttatttttatctatgcaaaccaaactttcattttcaaacgcacgctaaacttgcacatttatttattcaattaataactattatggggttcctactatatgtaaagggttgtatttttttgcttggaggaagatttaaaaagtaaatgagtaaaagtaacattagttgttagaaagagagacaagatgatattttaggttgggctcttcaggaagcagattttctgggagagattagcatgtgggaagttgatgagggtgttccctcatggaagggaacagcaggacacaggacaagccaagagggagaagtcaagctgtgaagaatctcagtaaaagcctccacccacccagaagagttctgaaaatggtatggcccctcagatctgtctcccattgggttcaggggttcaggtccttatacttcctcaatgaccagtcattgaaaagaggtttcctagtaaggtggcatgaccttgggagaggcatcctttttcagccaagacaatttctgaagggggattggtgtctgaaacctgtctgcagacaacactcccaggaccaggggtaatgtacccttaattttggaaggtggatctggatggtgcaacacagatgggaatgcaattgactacaatatgtagtagaaagtgataatgtcataagttatgttttacaaaaggataatagatcaacatagtttattacatgaaaacctttgacactactaaaatgttcagtgagaagtgactgattaggtaagtgataaaatagccaaacaagagaagactgtacagccatgaaatatcatgctcttaaaaatatttaaggaaatggaaaatgactattaaatggtgctaagaaagggacaaaatgatataaattggacaaatgcacacattctttactaaattagatcaacagtgatctagttggtgttaatggtggtcttttctgtttttccaaatcttgtgtaatgaaaatgtatttgctttataatcaaaggagtaacttttttgaggaaggatacaatgaaacatggttttctttctatgttcaggtacttgcacccagaaggattgccctccgactacacaatcagttttctattccggattcttcctgacactccacaggagccatttgctctttgggagattttaaataaaaattctgacccattggttggggttattttagacagtaagtatatttattgagatcacattcacatatacatgtatgagtaatgtatgtggcatgccattttgcctgtttgtgtatattacagagtaactcactaatcttatgtgatgtgtaaatactaaacaatgaattatatagcagttggtttatccatttattctcttattctttcaacaaatatttcttgagttcctattttgtgccaacactaagcctgggatgcagtagtgaggaaggagaagagagaaaaacaatttttactgggagagggaaaactacagacagagcaaggcccttggagggtcaatgggaggggtgggaccacagttcattttttggacatagacataataaaagtaagatgcatatttgatatcccagaatggatgtcagattgacagcagcatatttagaaagaattctgggatggagatgtacatttgaaagttgtgtgtctttgctatacaagccatgagactgggtgggatcaactagaaaatgagtctagaaagagcagagaataagtctggaggctgggaaatgccaatgtttggaggttggaaacgtgaggaagaaccaatgaaggaagcttcttaaccttgtgctcttggatgttgtaccatcaacctcaagctcttggatgttgtacatgatgatcacttaagcagatcaactttttggttaatatcactgaattttctatatctagttttagtttaggattccaatgaacctaggaaccaaaatttggaggctattactaggtgctaagtcacacattcggataaggaaagtattaagcttatttccgactagtatttgtaaaaggatttttcagtacatggaaactaatcaacaactaaatatgatattgtggaagcattttgcattgatattaaaactaaggaaaagctgtagattgaaagggtatatgttactaacttcatatatacctgggacttgaaaatgaagaattttcttaaaatgattaagactagcttgctccttttgaaaacagaggtattaatttgtagcataggaatgaattagaaagaaaaaagattagataaatgaataatatgaattattctctcacaaggttagtaatgctttgtatgcatatattctttattctatttgctattgaacaaaggcatttaaaaaaaaattccatagggctttggatctcaaatttcagctggagtgagaatcttttctctttctaattcatagtatcttttaaataataaaatattccttgtaataggaataatttaagattagaaaaatttttgcttgtttgttcataatgaatgaaatatcttgggtggtgtaatttgcacatcctaggaaagttggttgctgcagtgggttaaaaagacaaagggccggccaggcacggtggctcacgcctgtaatcccagcactttgggatgctgaggtgggcagatcatgaggtcaggagatcgagaccatcctgaacatgaggtcaggagatcgagaccaagccgtctctactaaaaatacaaaaaattagctgggcgtggtggcgggtgcctgtagtcccagctacttgggaggctgaggcaggagaaaggtgtgaacccaggaggtggagcttgcagtgagccaagatcatgccactgcactccagcctgggtgacagagcgagactccatctcaaaaaaaaaaaaaaaaaaaaaaaagagacaaagggcctggtttctattctttaagatttgataaacttaaagcagctgtgtctgcctctacttccagctttggacagtttctcccaggagagtgatgggaatgagagtctgggcaaggaagtacagaggtaagagtatgtgtaggagtctttgcctcactgtcatcaccaagtggcttaatcagttcatgtaaccaactaaaagtctgcggcaacctggggactgtagaacacttccttactcatcacatcattctaaatacagtttcaaaacaatcgatgcattgttttgttttgagttgaattttagaaaacaaaattcacctactttaattatttctaaaatatttttatttttctttcaatagatggtgggaaaactctaacatatttcaactatgaccagagtggggattttcaaactgttactttcgaaggacctgaaattaggaaaattttttatggaagctttcacaaggttagtaatgctttgtatgcatatattctttattctatttgctattgaacaaagccatttaaaaacaattccatagggctttggatctcaaatttcagctggagtgagaatttcctttgtgcttgttaacaatacctgtgcttgttaacagattctgatttggtagttctgagagaggaccctgaaatgtgcatttttttttttggcaggcactcccgaaaataagggggcactttcctctttgaggaaaaatgtagttaaggatatggcattaccaagtggacagttgctcatttgctacattaggtgcgatgtagaaaagattgctggtctagctggtacaactagctatctatgagtgcagaagaaagcacaatcagctgaatcatcttaaaatgtgcagatagggataactgattgcaccaatacttttacatatatacaagtgcaatccatcactgtcatcataacagttaccctgcggaaaaattttataaaacctaagtttacttgtcattatttaatttaatttatttatttattaatttatttattttgagatggagtcttgctctgttgcccaggctggagtgcagtggcgcgatcttggctcactacaagctctgcctcccgggttcacgccattctcctgcctcagcctcccgaggagctgggattacaggcatctgccaccatgcttggctaattttttgtatttttagtggagccaggatttcaccatattagccaggatggtctcgatctcctgacctcgtgatccacctgccttggcatcccaaagtgctgggattacaggcgtgagccaccgcgcctggccacttgtcattattttaataactcagcacttgtggtataactatgttccttaacatttgcttctcagaaacacttacctgtggtgatcattggggtggacatctaccaacatctactgcttcctttgtatttgaataatcccactgatctgtagtgttaagcagtgcagcacctacgctgcaggatgagcagaacatttactaggtggtgtagaaaaatgctttgcttcctaaccaggcccttactgcccttttaaagtgagagaagggatgctgcatagcaattttcttggctcctgtctcatggcccagaatgcggtcaaatcaatctaatttatgcaactttgctactttctgtggttttgaatatcgtaattgcataccacataattgcataagaacagttgctaaaaaaaaaaaaacaacttgctttttttcctgtttaataggactgtactaccagaagaaaaggtatctgaaaagcacatgagatacagtggagatttattagttcatggctcaaagtggtcccattagcagctcttaggacttaacattgtttactcaccaaattcctcttggcatgtttattttcttggttatggagagtgtattgcaaaatagtaaaaaataaaattgtttgggagatgaaaagcgtttgagatttcatgagtgttaaaagaaacattgtcattttagcccatggtttaggcatgaacttgtaattctcattccaaagaatcctttgtaagtcttaggtgaaggttaagctttatttccttaccagaagaactcaagaagtgaggttcattaaaaatcgatttaaaatttataaaccttcaaatttttaaaagttatatgaaggaagacttccctctactttaagtgttaataaagccaaaaagccaaacaaggaaaaaaattcaaaaaaggcttctcatgtgacaaaatactttataatagacctattaatagaatatctcaatgcaaattcaatttgtagaagtcgaattctatttgttcatagacttataaatgaataaatactttatcttaatttctcattgattttcagttagttttattttttacactttggctatgaagtgtgggcccaaggtctctttcaaaaagttttaattatataaatgggcacttaagtgcaaccaaagaagcaaaatatctttgaaaaattttcaatatctccttttgtaaagcaaaaaaaaaaaaaattaagcatgtgaataactccccacaagttaacaattcttaaggcaggggtactagaaactaagttttctagcacccagtatgaaaatttctgtaatctataatattggaaagtgttctaaggctcaaaaacacataagagttgaattatactctagtaaatgattgcaacagagatgttaataagaagcaaggaatgtggtggggtttattccatcaatgtttccatacttgggcaatagttaattcctttttgaaggaaaaggattctcaagagtcccactgttgacttacattatttgtatcatgatctaactcaaataaaacatgaaataacaattggtgtaagtccatgtgctttcagctcgtatgcaacaatgaaacaaaaatgaagttgaacaaaaccagtaaaattaaaagtaacactatcttaatgtgaaagaggacattatttcattgacattcaacctgtacttacaatgtgaatacactgctagctactataactcccataactttgattgtattgcccaagattgtttttctttgaactaccatgataccttaccttaaacagatttgtaacttcttttggcttttacttagggcaaaaccgttatttgcctattaatttcaccccataaccttgattgtattgaccaacatggtttttctttgaactaccgtaatgccttatcttaaacagatttgtaacttcttttggcttttacttagggtgaaatcattatttacctattaatttgactcttttagctcatcagtctgccaaaaacaagtactgtagtactcgtgaggttaatgccattgtaagttacaatgcatatataagcactgaaattttatggcagaacttggacatagagtagttatccagttcatctagaatatacctaactttgactatcacctaaataagacagattttacgagtccttacaaagaatgtgtcaactcctgaaaatatcacggacctccagattcttgagattctagtttgagaaaaatgtaccatacactaagctaaacagctttattttatttgaacctgggttcaccagaaagcattccttcttccccctcagattctagatcccctttcctcatcctaaattaaataaatatttttgaagtgtggtttgccaaccactcgtggtgctttggatgattgttggtgatacatcaacaaagatttttaattttaatatttttgtgttaattttaatgtgcattcagaaaaggcatggctagtacagcagtcctgtaatttcaaagatgcgattgctctcgagttaggccggactttaaaaagtgaatcctttcaaagccattttagaaagaagtgttaaatagataaaaatagagatggtacttgaatatgggaaaatcatggagatgataaaagtagaaattttctcttttggcaaaatacatggtgacagaattctttctcttctctttcatactttgtaatgatgaatcatacaattatacaaatttggttgatatttccttctgtttcttacctcctaaaacatcttacttttacctagctacacattgttgtcagtgagactttggtcaaagtggttattgactgcaagcaagtgggtgagaaggcaatgaacgcatcagctaatatcacgtcagatggtgtagaagtgctagggaaaatggttcgatcaagaggaccaggtggaaactctgcaccggtaagtgaataaacccgtgaagctgtgttattgttaagggagagaaattattttaaagtacattagctattttccaggggaaaggtttaacaaaaagatgaatggataaatggatggatgaatgaatggatggatggatggatggatagatggatggataaataaataatggcctctttaaatgaattaagacatgtacattcaaagcttgtggtagtatgcttccactgtattatatggaatatgcattaggaattaggctagtttattttctaagtgcattttaaaatttaaatagtaaaatattcatcacatggtttggggcataaatggtttttagaaaagaattacaactgcaaatgaacctcatttatataagcaaatacaaatccacacaaaattagtgaatattatacacaggaaattgacataagcctcttatttgggttagatttgggcattttaaaactaggttttgctatcactaatgtaaagtttaccctttaattattgtgattattgagtaacataccattctaagataatatattttttaccttacaacatggaatttaaatctgagagacttccagttggcaaagaaatcacattcccatcactcattacccacaaaaaaaagaatagtgcacacagttttttgtgttaatactgtgtattcacagctaattagcagcattctctaatttgagtcattctatagtgaggcattttattcttgtaaacaatcccaactgttctaatctacacttctcttatgtaatagaacaatcaagataattatgaattactattgtctcccactttcatagatctgtagaattagccagttatacaagagctggtagttctccaagacttttaaagctgaagatcactttgtaaaaatgaaatcctatactatgtcaaataaataaaacagacccatggttctaattccactaccattcacttagtacacaggaaatagtccaagtgggagagtgatttactttggggcactttgctattttgcagcatttatttttgtggtaacaatagaagtgaatggtagcaatgtgtccccttatgtatagggggacactgaagctttcagaccttgataggtagatgatgctaagtagtttaacacttacagttgaagtatctttaaaagttcctttgtttctactttgctttggagaattatggattagatgtttaggaagagaatgtgaaagctatggaaggctctcttgttctcagttacagtaagagacttttgggaatgtttacatgatttcaaaaacttgtctcctcctaatgtgtggcatttcatgataattaaaaagcacaccatcttctgcttaatggaggatactcctatgatagtacatgaaggaatttataaaaacacagaattatcaaactaaggatatcttgtatggataaatggatatatagatggatacttggatgatgaatgaatagactctaatttaagaaagagaatccgggccgggagcagtgcctcacgcctgtaatttcagcactttgggaggccgaggtgggtggatcatgaggtcaggagatcaagaccgtcctgtctaacatggtgaaactccgtctctactaaaaatacaaaaaattagccggatgtggtggcacgcacctgtagcccacctactcgggaggctgaggcaggagaattgcttgaccccaggaggcggatgttacagtgaaccaagatcgcgccactgcactttagcctgggtgacagagcaagactccatctcaaaaaaaaaaaaaaaaaaaaaaccaaaaaaccacaaagaaagagaaaccattctaggtatatgagattctgggcccagatcacataatactattattaatattttcttaattttagaaataacgaatataaaattcctgaaagttagtaggcgttcactgaagagcaactattattattgaagaaagtctataacacattctccatcctccatcccaccttttctagacttctagcacttgattattgatagtcacatactattttgtttctctttcatatatctacatttcactcctctaaccagattataaatgcctcaaaatagaaaccgcgtcattgtctttgtttaaaaccaccctacatcacagtgtctactcaatactgatgaacagagtaagttctcaagaaacatttgatagaaattaaatagaatgttgtctgttcaaattgtattatatcttttcttaaaattttgttttgcatatattccatgtgtgatgttgacaatagtcccataatatatattgtaccctctcctaattattttataattataatatatttcacaatgatagttttacaattgtattttaacgtatactgtatgtaataattatgctccaaagatatgaccaactaaatatcaactaatttctttctgaaagtaaaaatgcctcaggtttcaggcctactggtgatcaatctttacttttggccatgagagaaatggaattaaacagagcactctctgtggttatttccaactagtagtagacaaaggagaattatagaagtcaataattaaagagttctttgtaaggctagtaggaaaaaagtcatagcatttgttgaatctagaagtctacaaaggattactaactagattttcagtctgcccacttactgaagaatttgattatgttgaaatgaatgtattaagttagatctcaagaatgtgattggaaactcagacttgctttttgagggatattacttaatcatttcagtacaaggtaagagaagtctcagttttcaattttaaatttagaaatcacagactgccaatctaaccttgatatacatttgtactctaatatccagcaaaagggaatgtatgttgtgcaaattctggattattctaggaggagtaattattatataagagagattagtaacttataggtctccattccctgccaaatccaacaattattcaataaatgccagatggtggaagtctaaacatttagtctttaaagaaactgtattctttttaaaccataattgagtggaagatagattaatgcatttaaggatacagtaactactcgatagaaattacgttcttaataaaatcaactggtgttcagcaatgcaagattgtataggcagtaacagtctctactggggctaacctaacaagcaggcttaacttagctgtctaaatacatgtggaatgaaacttaacaactgtgcttctcctttccaaacttttttctcctaaaaagtttctcctgcattttctggtacctaatgaaatgattctagaaaagttttgagcttctggcatacaatcatatttcttagtgcctttcttctacctttcaaatctaatacttaggtaattatccaactggcatatatttagctccctgctgttcaaataacagagacatatgagttatgctatggagttgcctatcattttagccactgagttacagcttttatatataaatcaatagtagactagttgatgattctacaaacacttgtttgaaaataagtgttgttaaattgctaaaaaatatagtatattttcatgtgaattatctattttaagcttttaaaattataatgatagctaatagttattacatctctgctaggagctaggcagtgtgtattttcctgggattatttcatttaatcctgtaataatccttgaaagaggtacttgcatcttccctactctgtagatagagaaactgagactttaagaagctagggtcaggtcccctttcaaaaagtgagagtactgaaataagagactgtatccaacttctataagatcatctgcctttcattcctgtgcttcttccattaggacagactctgataattatagaataaaggcagagaaggaagtttggtttgtactagagactatatgtcctatctgtacattgacaggttcaaagatttaccattatttgaattacaaccttgagagcaaagtaatcaaaactaccccccaagtgtgtctataccttaaaattctaattaataccaacaagtacaatagctatgaattttattttctaatttaatcagtgccttcgtggtttcccttaaattcaataaattgattgaaaacaagttaaaaacaatcagttcaatagttgacaagtggtaaatgcacaatcttagttttgtgatggcgtcaataaaggttagacatcaaattacaaacagaaaatggtttagttcctctgtactctttcaccagtattcttgtgcagtgtaaagctctctagatatttatataaattcaggtacagctttacttcaaattataaatttagttaaaacatgttagaaaaaaaaatcagagaataaaatttggcactgagtggaaaatggagccagaggtacattttaattcccattcacagatcaaaatgactcaactgctaagaaatattttaatcttattttcctgctaacatttgaccccaagtgacttgccttttgtgctataccaggcaaaaatgtctaacaatgaaaaatgagcatttgtagttgctcatttcaagtattcccttgaaagagattatgaaaagtgaaagtgggaggttttgtgtctcttcctctttttttttttttttttgcaaagatgtatcttttataattttcagtgagttacaaaaacgttacaaaagtaaaaaagggctgcttcttggattagttctctaaagtattatttattttgagccacactatcttgcattttaaggtactcaaatatgagatctttgacataccaccttgtactgtctcctgtataatttgcacaaatatgtatgtcattgcttttggaataaaagccaaaggctttttttctcttttaatcaatcccctgaaatgtgccttggaaaaaaaaagtccctaaataaaggctgaggaatctaaactattacaagtgcaaacaattatgaataaatctgttgtactcaaagaaaaagctgctgacatcatctaacttgcaaaagaaaagtcagcccacgtaacattcctgaaattataatattggcttcatttagcacttagtaagcattcaaccccggaataaataaattgagctcctaagagtcccaataatttcataaggcagaagtccagtcaaaggtttgtaatgtagacattagactgttataggtggttaggtggtagatgtttatttgaaaaacttcaagaaatcctgatgtatactggggcttgtgaaaggcctttgctttaagtaagtctttccattcatgaaaatgtttttgctctgagggctctactcagaaatggaaaatttcttaatggataaatgatttgcagacttagctgaatctatccaatgctgtcataatgggacctatttaataaatgtcccaagacaaaatggcattgtaagatttcattgggctatctgcattttaaacgttagatcaaagatcagtttactggaaaataaaccacaagaaaatggggcatgccatttaaatctcaaacagaactaagccttcaacatgtgattacgttatttaaactttttcttccccggtcctattccacagaatggactttgctatgatcataccccatagcggcaatctgaagatgtaaagatatatgcaaagtgcttaggatagtgcctggcattcatttctgcaaatgtttgttgctattgttgttgttatttactaagatttttctgaatcaaaacatttcatagatattattattgtggaaacaaactactattatatttctgtcctcaatactgtcactgtcattttgattctacttttttggcctttgtattatatgtacaccttctccttaaacaaatcaattatgagaaagctaatatttattatttatagcaactatgttccaggtactgttctaaatatttcctctatactaactcatttaatcctcacaaccacatgaataggtactattattatgctcactttacagatgagaaaactaagatgccaagacattaaataatttgttcaaagtaactcagtctgtcagtggaagagttggagatgacacccaggcagtctagctccatactctcagaatccgtatgatctttgaaatatttattgttagtgttgttgtaattgtttataaaaataagctataatgtatttttccaaatgttttaattttattaggtggtgcaaaagcaattgcagttttgacattacttttgcaccaacctaataaaaacttaattttttattggacataatttttgtttgtttgtttgccctggacagtctcagttatcatactcttggatggtggaggggaaccttaaaccacctggaaaaaaaaagcagtgagccatgcacatatttctgcaaacagctcaataaggtgtatatgggatcatgaaaataagatgctttgacttatggatttgctttcaaaattcaggggttactttattgatcagttggaatgaatgtttgcaataaggcataattacttgagtataatgacagaaagcccgatttcattctgcttactgtcagaacaagttattttgtgatagtgcatgcatttttaataacatgtttcaatagtactatctacttgggcattaccatttttctagaagatgtttggcgaaggatggatagtactatttgggagaaaataaggaaggcaccaagagtttccagtctttgctgaaaacaccacttgctgaaagcaagattacagatttaaaatgaaaacaatttcatccttctcccagatcagtaatagagcacactcttaatatttgaaaataatgtaggaagaaatatagtaaaaatgattgggtcattaagctagtgttagcccttaatgatgttgtaattatgtttctgtatatttcaacatgtacattgacttatcaccaacatacatgagtggagcaagcctgtctaaatatttatggcatgatcaatggcttaaataagaatacacatagcttacattctcacaatactgaatgtgaagctgtcatgacatttgccacattgtgtaccatatttatgtgctcccctctcactccctgtaagttcttctaggtcaggactatgattttttaaaaaatgtttgtatcctaaaagtctacatagtatctggcttatattatgcactgaagaaaaagttactgagtgtatgtacaaaggaatgaagtgataattaattcaataagccttcctgagtgctttttatatgccacatattatgataggtgacctaaagatgagtttggtaatgtaaataattgtgtagtgggaggtgtgctatagaggaggcatatggagtgttgtgtgactacagagtcatttgggagcagctgtgatgggctttgtaaggaagagtttaacagaggagctaagcttactctttaagtagaaatgagaggggaagttttgataaataagagggtttagatggtggatgaataattgtagacaaaatcttagatcactatgtgtttgaggaaaaaaattagtttgacattgttggagttactttttaatttacttactgtaatgtattattaatgtattggtattctgttatataatacataacataaaatcattataaagataatttatatatattttattgaatgacaattttctttttaaatcatagttccagttacagatgtttgatattgtttgctccacatcatgggccaatacagacaaatgctgtgaacttccaggcctggtaagaattcttccttcatttctattgattttttaaattgtatttaattttctggaaatgagaagctatttctcaacattcatatcataggcaactcgttgagatgataaaattagaaagagattaataaagaggcatgtctgaaattaacaagatttctcctgtataacctaggatcacatacagcgtgaactgcccaactcagagggtgctatttacacatagtccagatgttcccagattccatggctcatgaagcccttagtgtctcaagctttttcttgcacccctaagccaaaagaaacaccttgcagttccatttatgaaataataggtccaaacatcttactaaatatttatgtcctaacaactcagtagccatataaaataacaatgcacatacattgaaagaaaaaagtgatatttatattttattcttaaatgaccaaaattgcttattgttgggatgtgtgtgctacctgagccctgcagcatttctcatatcttgggatcacattggccactgccatcctcacttctttttctacattgcttttttcatagtactttcctttcatcatagcagctatatttgtaaattagggcatcatccaaaaaaagtgttgcaaaatctaatgttgaaactgcagactaccttgagcctgtcattcacacgaagtccagtgggtgctgaatattgctgtacttctcttaaatttttaaaacattcacaggacccctgtgagctcaatatagtgctcccaggcatcttggtgtacaattttagaactgtagtcataatctacataacctatatgtgatgctactagaaaactaaacatttaaaagttatttataccaagtgatggtgtaaatatttatgtcctaacaactcagtagcccatataaaatataatacacataaattggaagaaaaaatgatatttatattttattcctatataagcataatttcttactgatgggatgtgtgtatacccatatattttatatatatatatatatatatatatatatatatatatatatacaaaaatacagatttatatcttaggatcctaggacaagtaagctggcacggacaaccatgtcatggttgggcagtagtcatgtcttaataattaaagctgggattctccagagcatggggaacccttcatgaagtctgtgagatttgaccttataaccgtattagtttgttctcatgctgctaataaagacataccccagactgggtaatttataaaggaaggtttagttgactcacagttttgtacggctgtggaggcctcaggaaacttacaaacatggtggaaggggaagcaaacacttccttcttcagaaggtggcagcaaggagaagtgcagagcgaaggtgggggaaaacccctcataaatccatcagatctcataagaatgtgctcactatcacaagaacagcatggaggtaaccgcccctatgattcatacctggcttacattatgcactgaagaaaaagttactgagttgaaaaagttactccactgggtcctgcctgtgacacgtgaggattatgggaactatatcaagatgagatttgggtggggacacagccaaactgtatcagtaagacttaccgtatcaaaaagccaaaccatataaataagacttaacacctcacaacatctattgcaagcaccaaattcatggcagtctgtatttgagaaggaagcaacttgttatttcttcaccaaaataagtttctagtaaactctggaagaaattaaattagagacaccttgatgttatgctaaagggaaggtagatgggaaactggcaggagaaacactcggaatcctctgttgtatcaagcaaagatgtgatcaccactttttctaggaaggatctttctcgttccttttctttttacttgtctcatttaagaggcgtaaattccatagtaaaaagacaccgtgcagtaacagtcagcagcactggcaaaactatcactgagtctctggctacaggtggcctgttgttagccttattttgggatctttcagaatacttaactttatgtttcactctagctggccagatttcaggccagatgtgtttatagggggtttgaactgaaatattttactgttgtccaacatttagagaaaagtatatacaccatgtaacagtccatttgcttaacctttcttgggtttctgttgtgaatattgtagagactcagattattttcaatttggcaatttaactgtcatctgtgctctatttggctctaattttattttcccccaaagtcttaaataatgactaggtttttctctatccaaagggactgatgaactctgtgaagttctatagtattttatcccagtgctgagctcattttggctgctgctctaaatgggatatttacaaattgttcaatagctgttagcaggtgctctgtcttcctctgcattccagtaactcattcagatatattcagccttccattaataatctattttgtaatgtcacatgacaacaatattccctaagagagaagaaaaatgttctcctattccagagcctcagatctacactgtgatgtttttcttactttcaaccacagaatgtgagcagttgtggaaattgtcatagggaattgatgaagagtttaaacattgattttattttgtttttctttgtttgttttagtacagatatagttgttttgattgagtactccaagttttcctttatcctttgaaacagaaaaattattgtagcataaaaaagttttcaagacctttagttcacagagtactatcactccaaccaacagaattaaatagtaatcaagattttttttttgttgcactcacttctgattgtctttcctcacctggattcccaagctggttttagcaacacccattgataatagtgattatcagtgactaggaggtacccattcatttttctttacagaaaagattttgtaatcaggagtgaatattctctgcctttctaatgtgcacttgaaaatctaaaaatatcttaaatcaaactgttttctttgagccagtaaagccatttgtataaactggcatgctaatggttgtgctttttttgtttcttttcagagagatgatgagtcttgcccagaccttccccattcctgctcctgttctgaaaccaatgaagtggctctgggaccagcgggcccaccagtaagtcttgctgagttcagccttaaattttctttaataatattaatagctatcacttgtgtgtctaatatgtgttgtctactgtactaaatggctattactcacttaattgtaggaatgcagtgagacacagagatgttaagtaacttgattaaagaacacagcttggaggagctgggctgggcttcaaatccaagtctccatgactcctagagatgatgcttctcaccactgtgtcatacgatgtctcatactggtctatattcaaaatcttcccttacagctactgtggttaattttcggtgtgaatatttcaaaccaggacctttacttgtacctgtaagatttgcatacatctgctttgtccactttctctctttttttaaacttttactttaggttcaggggtacatgcgaaggtttgttacatagataggtgaactcatgtcacaaggatttgttgtacagattatttcatcacccaagtaccaagtctagtactcaatagctatttttctgctcctttctctccttccatcctccaccctcaggtaggcccccgtgtctgttgttcccttccttgtgtccatgagttctcatcatttagctcccacttataagtgaaatcatgtggtatttggttttctgtttctgtgttagtttcctaaggataatggcctcctgctccatccatgttcccacaaaagacatgatcttgatcttttttatagctgcatggtattccatgatgtatatgtaccacattttctttatccaatctgtcactgatgggcatttaggttgattccatgtgtttgctattgtgaatagtgctacagtgaacattcgtgtgtatatgtctttatgatagaagggtttatattcctttgggtatatacgcagtaataggattgctgggttgaatggttgttctgtttgtagctctttgaggaatcaccacactgcttttcacaatggttgaactaatttacactcccaccaacagtgtataagtgttcccttttctctgtaaccttgccagcatcagttatttctttatgttttaataataggcattctgactgctgtgagatggtatttcattgtggttttgattttcatttctctcatgatcagtgatactgagctttttttcatatgctttttggccacttgtatgtcttcttttgaaaagtgtctgtttatgtccttcttttgaaaagtgtctgtttatgtcctttgctctctttttaatggggtcatttgggtttttttcttgtaaatttgtttaagttcctaatagaggctggatgttagacctttgtcagatgcatagtttgcaaaaattttcttccattctgtaggttgtctgtttactctgttgatagttacttttgctgtgcagaagcaccttagtataattagagcccatttgtaaatttttgcttttgttgtgattgcttttgatgtcttctttgtcatgaaatctttgctcgtgcctatgtcctgaaaatggtattgcctaggttgtcttccagggtttttatagttgtggattttacatttaagtctttagtccatcttgagttagtctttgtatatggtgtaaggaaggggtccagtttcaatcttctgcatatggctagccagttatcccagtaccattattgaatagggaatcctttctccattgcttgtttttgtcagctctgctgaagatcagatggtcataggtatgttgtcttttttctgggttctgtattctattcccctggtctatgtgtctgtttttgtaccagtaccataccgttttgattaccatagccctatagtatagtttgaagttgcataacatgatgctccagctttgttctttttgcttaggattgccttgactatccaggctcttttgtggttccacatgaattttaaaatagtttttttctagttctgtaaagaatgttattggtagtttgataggagcagcagtaacactgtaaattgctttggggaggatggccattttaacagtattgatacttcctatccaagagcatgaaacgtttttccatttgtttatgtcatctctgatttctttgagcagtgttataattctcattgtagagatctttcagcttcctagttagctgtattcctaggtattttatgctttttgtggcaattgtggatgggattgcattcttggtttggctcttagcttggctgctgttggtgtatagggatgttagtgatctttgtgcattgattttatatcctgaaactttgccaaagttgtttattagctgaaggagcttttgggctaagatgatggggttttctacatgtagaatcatgtcatctgcaaacagggatagtttgactccttgtcttcctatttggatgcctttatttctttctcttgcctgattgcactggccaggacttccaatactatgttaaataggagtggtgagagagaacatccttgtcttgtgctggttttcaataggaaatgcttccagcttttgcccattcagtatgatgttggctgcaggtttgtcatatatggctcttattattttaaggtatgttccttcaatacctattttattgagagtttttaacatgaaggatgttgaattttatcaaaagccttctttgcatctattgagataattacgtggtttttgtctttggttctgttcgtgatgaatcacatttattgatttgcatatgttgagccaacctagcatcccagggatgaagcctacttgactgtggtggattagctttttgatgtgctgctggattcagtttgcaagtattttgttgaagaattttgaattgatgttcatcaaggatattagctggaacttttcttttctgttgttgtgtctcttccaggttttgctatcaggatgatgctgacctcatagaatgagttgaggaagagttattcctcctcaactttttggaatagtttcaaaaggaatgttaccagctcttctttgtacatcttgtagaatttgactgtgaatccatctggccctgggctttttttttggttgctagactatttattatggattcaattttagaccttgttattggtctgttcagggaatcaatttctttctggtttagtcttgggagggtgtatgtgtccaggaatttatccatctcttctaggttttctagtatgtgtgcatagaggtatttgtagtagtttctaatggttacttttatttctgtggggtcagtgtaacatcccctttgtcatttgtaattgtatttatttggatcttctttcttttctgctttattagtctagctggtggcttatctatcttattaattttttcaaaaaactaactaactactggattcgttgtcttttgaatattttttcatgtcttgatttccttcagttcagccctgatcttggttatttcttgtcttctgctagttttggggttggtttgctcttgcttctctcattctctcagttgtgatagtaggttgttaatttgagatccttctaactttttgatgtgcgtgtttagtgctatgaatttctctcttaacactgccttagctgtatcccagagattctggtatgttgtacctttgttctcattagtttcaaagaacttcttgaccctgcttaattttaattttttatatatcctgagattatgttaaaatgttcaaaatattagaactgttgtcttcctattggcttgttacgtgaatcattgtgaatgaaaccatttaacttcagtaatgctttttacttcaagtctgatttgtctaatattaatatagtttcaatattgtcttttggactctttgtctaattttttaattttctaatttgtctaacttgcatgttctcattccagccagttggaaagggagaaaatggttgaggacagcatttggttttcatttaagaataacacccagggtatatgcagcaccctttctctcatattccattagccagcacttagtcatacctacttacgtaggattccaagaaatcaagtccctagttggatggttatatgtttagttaaaactcaggggattgtattattacaaagaagcagtggaaatgaatatgaggacaattagcaatctctgtacaactgtgaaaacttttttttttttttttgagacggagttttgctcttgttgcccgggctggagtgcaatggcacaatctcggctcaccacaacctctgcctcccaggttcaagtgattctcctgcctcagcctcccgagtagctgggattacaggcatgtgccaccatgccaggctaattttttgcatttttagtagagatggggtttctccatgtttgtcaggctggtctcaaactcctaacctaaggtgatctgcctgcctcggcctcccaaagtgctgggattacaggcgtgagccaccgcacctggccaaaaactcttttaaaaacatttcagatgtcagaaataaaaatatttcagatgaacaaaaactaataatttaccaccaatattctctcattaaggaatatgcctaggacataatttaaaataaagaaaaatgataccagaagaaattatgaccaaagaaatagcaaatatatgggcaaatcttaacaaatattaatttgtaacatatattttcttcactttttatttgcgacatttcattgtctttatatttatattttagatatttctctttaaatagcatatgccaagattttgcttttaatccagttttacaatctttctttcatagtctagtccattctgttggttgtaataactgacccattctgatttacatccacaactttaattttactttcttggtttttcttaatttcttaatttttgctttttatttgtgttacatatatattttttgcttgagattgtatttatttttgtctttaatttttgctttttttgtattccttttttctcctccactagtttggaaagtatactctgtagcttttctattaatagttaacccagaagtttctaccagatatacttagtttaacaatgtttaaaataatcaccatttctatcctactttgccagtatgatgagttggaattctttcaacttagatcatcttcttaataatttatgtgctcttactacccagtattttaatactgtttttaacatcacaaattagatgtcttgattattattattgcttgtgtgaactctaaaacataaactttccagcaagcctcagccatctttcccatccttcctgaaggcagtttcagttcacatgtatactatagttttttattgtttctttcttcttggtacttaagaatagagttcttaattacagtagtgttttagccagcattaatacatgtttatagcaggagggttttcaagttttttcatctgtaatttactggaacaagtgataaaatatttatttgtgacctaaacagcaaactttctaatggggagaagcagcagagatgtgaaagggaagggttgagctttgaattggagggggaagaaagatgtaaaatgagaaaaaagcaattgaaaatttatatttcaaaaatttcaaataaggaaattttgtattctaaataaagcgtaataaactaagaaatagtatcctgagcaatatgtaataaattctgtttgatgattgaacattctttaattgttttctcattcatgaatttacacagtagtatgacgtatcaataaaactaaaggatctgtaggaaggcctggatagaagaatcatattctctttgtgaagtctaagcctctcttattgaaaaaatgagtgttttcgtcaacaagtatttgctgaattcttgtgatatgcccagtgacaagggttaaggatgaggtggaaagtaagttagaagtgtaaagtggtccctggcttttagacatggtgcctctgacatgaatatctgtgaggtaaacagtcttgattattattatttgaataaaatcttcagttgaagatatatttgaatatatatttgaataaaatcttcagttgaaaacaaatcatttaagatgcaaaaacaaaattaaaaagttgtgacagactgggtatattaactgggagagactaggctgcgagaaacagaaaatttagctaacacagtagtgtaaactatgaggacaataggacatttattgtttgctcaatagaagatttagagggagatggtctgaagaaggcaaatgaggctgctagacgacttcatcaaggacttgtgcttgctctagcttcccatgttgcttcttgatcaaattggccaaaactgcttaacacaatgattcctggttgcaaagaaaagctgagaaaacaagtatctgtcttttttggcctttatctagggatgaaagggaaaagggggtcagaaaaggctcttaggtagccagccatagtttctgacacactgggggaaaaactataatgaagcatatatggaaatctgatatatggcacttgatagtggcattgcagatcaagtagagaaatgattgatattcaataatggtgctgggacatttggtcttccatgtagaaaatatctacaaataaaaatatatataacatctaagtttgtgtaagtacactccacgatgttcacacaacgacaaaattgcctaacaacacatttctcagaatgcatttccatcaccaagcaatttatgacttcatatgaagaatttctactcattaaagagaaaaagacatgtaacccaatggaaaactgagtaaagtatataaatagacagtcacagtgagaataaatgcaaatagataaacttatgaaaagatacataatcataatagttttcagggaaatgaaaattagaacaagaataaggtatattttcagcaatcaggttgataaaaatgtaaagtttgataatattcagggttgattaagatttaaggaaacagggaccctcttaaactattggcagatcaataaactggcacagttagtttagagtacaatatgataatatatctgcaaatttatcaactttcacttaacgattctactcttggtatcttcttctgagaaatactaacagtttcacttaagggatatgtaaggatgttaattgaagcatttaaaaatttttttttaatttttaattttttgagacggagtctcacgctgtcgcttaggctggggtgcagtggcatgatctcggctcactgcaacctctgcctcctgggtttaagcgattctcctgcctcaacctcccaaatagctgggattgcaggcctgtgccaccacactcagctaacttttgtatttttaatagagatggggtttcaccatgttggccaggctggtctcaaactcctaacttcaagtgatccacccgccttggcctcccaaagtgctgggattacaggcgtgagccagtgcgcccagcctgaagcattgtttaaatggctgaaaattgtgggaataaaactacttaaatttccggtaataaaagaatggctaaacaaactcttaacatatccaaggttcagacaactatgcaacagttaagaatgaattagatctatgtgtgctataataaaaaatcactaaagcatattaagttgaagtcataactatgtaaaaagtgtgacatcacatatttaaaacatacacagcaaataatacagtaataccacgggcagtattttgtatagatatagatgcacataaataaaattacgttttataattgcatttttaaaatctagaagatgagcaactaattgataaaaaggaagagtgcatgtaaatggttttttaaaaagctgaggaaattttaaagatcacctgacccagtgttttcttaagtgatacagcattctgctaatagtgtacagaatcccttttagtaatcctggacatggcatgaaataaactggaatcacacagggagaaagttattccattttcaatgatttttcaatccttctgctcaggtaaaatataaattctgtctagtgcccacatggtcctcctaacactcatctccctttttatcgaagagcgaactcttggctcacagacttcaatagaaacagaatctagctaaattttttttgttttgagagggagtctcactttgccgcccaggctggagtgcagtgatctcagctcactgcaaggtccgcctcccaggttcacgccattctcctgcctcagcctcctgagtagctgggactgcaggcacccgccaccacgcccggctaatttttttgtattttcagtagagacggtgtttcaccgtgttagccaggatggtctcgatctcctgacctcgtgatccacccgccttggcctcccaaagtgctgggattacaggcatgagccactgtgcctggccaatctagctgaatttaatagcattatttatagtgtattgatttctaagattaccttatagttttagcaagcgatactttttttcatttactgtaatgctgtatttgcttttaaaataagtgaaatagtcaattaagatattcagtaaatacacacatgtgtttagacacatatgaacatatatacagggaatatatacacatatatatacatattatgtttgtagatatatatctatataaagaaaactgctattaaataatagtctagataatatggcaaaagttttgaggggaaatatgaatgacaactttcagaaagatgaaactaattgtccttttgctgtgtaaataaagaaaatcaggttgttgctactttcatgtgctttctacaatttaattggatcatctcaaagttatgttttatatgttatatatgtatgttttataacatatataattttgattaacattgtattctttgggtcattcataatggtagtcttctataaccactaagtaaataaaatcttaccatttttcaatatttaaaaagaatttggcaaagaaagttttccaaaaccatgaaatcgtctgcagcgctggggctgggtggtaaatttccagttaaggatcatgatgaatgtatactattacacagtgtgttggcctttacataaaataataatgagttaattcatactattaaggaaaatgaatgaaatacactgttttgagatttgtctttgagctaatacttaacatctgtttgccagggtggtccaggactccgaggaccaaagggccagcaaggtgaaccgggtccaaaggtaatgcgcatgttttctctctctctctgtctcatctctctctctctctcataaatagccatcattttggagctaaatgtgacttatttcacccttgcaatctaaagttccttatagttttatgaaagttgtgcctaacccttcttccttattttaaaagcctatgcttttaatcaaaaagaatatttaataactcaatgaaaagaaaggcttctgggtcagaaataagaatgtcaatgttctgagtggtttagtctccaaggtagttctctcagaaattgtacattcttctcttcctctacctacaacaaaaacgtatctttagaggaatcatgcagaaccacaatttggtattagtcctttccaggtaatttctcaggttttggattcctcctcctccactgcactatatataatcaaacacacaactctgtttttcattcttactgcccagggtcatcaaatgtggtggttcaggttgtacattgttcaaaggcacctgccaagagaccaagccatgccaagccatgtcaaggaacacgtttttctactttgcacaaaggcatcctgaggactggcagaagcccagtcactaatggagttcaggcctcaccatcttctctccagctcttggcaaatcttctaactggtcttctgtcccaagtggcttaacatttcgattgattcttcacatctgcccccagattaatttccttaaagtctatgctggatcatatcatacttttcaaaaacctgcagtcacatgctgttgccttcagaataccgttcaccctctttgctgaggcatttaaggccctttgtaacttgactcccatctcattttcaccatgttgctccacatgttctcctctccatccatcttgcttgacttactgctcagtatggtttcttattaaatttacatagcatttattcatggagaggagaacattgcaaggttttttaccataaaattggaaacagatgaagcaaggtagaagaaaatattgggataaaaaagaagtaaatgaaagaaggctaaagacaattaatcaggtactacccaatccaaaattcagaccataagatgtctccttttttgtttattttgtttggtgggacagacttgaggtatcttacttggttccatcttttatggtgctgtaagaagggcagtagttggaggcctcttctcaagcaagggtgcactggatcttcctcagtttcacccaaaggcaatgcccctctgctcctatagattctagttccctcttcccagtgcctctatcagcatgaccccagtgttttctaacatgatcactggatgatcgttctaatcatgaagataaatgagttcgtagatgtttggtgatcccaagacctacccatttcctccaattaccatttccataggttgctactgatatggttatttctgtatgatgattttgatgaatcacagatccaagtgagtagtggtttttggaaaaagtcttattggacaaaggacgttgacatgtccaccaatgtggacagtgcaggaatagataccttgcatacggaaggccccagtatgtatgattttttattttgttgcagcaaatacagaataagaatttggaaggacaaagcaaacctcttgttggtctctcctagtcatttttgcctcatattttataggataaaatgggaccccctagtttttgcccttctactctatttgcaatttctcgataacatattattaaactcagccaggcgcggtggatcatgcctgtaatctcagcactttgggaggccgaggcaagtggatcactttgaggtcaggagttcgagaccagcctggccaacatggtgaaaccctgtctctactaaaaatacaaaattagctgggtgtggtggtgggcacctgtagtcccagctactcgggaggctgacacaggagaatcacttgaacctgggaggcagaggctgccgtgagcagagatcacaccactgcactccagcctgggcaagacagggcaagactccatctcaaataaataaataatatattattaaactattatatattaaaatgatttattattaaaccattacaaatactaagtaatacataaaaattgcctccttgctgcctccatcgtatttttaaaaatccagctccctccctctcccttcctcttatgccatgctccttgtaagaatagttatcattcagtgcttccacacgctcacctcccaaagaattctcaacccacatatgcttcctcttcctctgggagtcctatgaaaattctctcataaaagttcctaattacttgcttgttaccagttccatagattagagtttaatttttttaacacaatcaaacacttctttgtttgaaaatttctcctcctttggctgtttctatagcacaataccactccgtcttcagcctcttcctaattctcgggctttttcatttcagattcttccccaggtttctcttcctttcccttctacctgattatcatctcatttttatccacattctatttcactcactcaatacattctccttaataacctcacctataaatatattttcaactactccaaaatccatcccagcatagaccttgcctaactccttggcctgctggacatttccatgtggtttatcccaagcacctaaatcttaacaagtcttagtctgcactcattatctacccacactttaccccacaatgcctttttttctgtattctttgtcccatgtaacgtgttcaccaatctcagagctaagatgatacacagatgttggaggtcctaatttaataaaagaatagctttagttgaagtcacagaacgagacagaagagactgaggataggtaggtttttgggtctaatatttcttacatggtttagttttagttaaaccgcaacaagatccaagctacagaaataagggttacagaaataagggtaaaagggatgtctgatcctgaaaagaaaggaagtaaaataggctgggagtggtggctcacgcctgtagttccagtactttgggaggccaaattgggcagatcacctgaggtcaggagttcaagatcagcctggccaacatggtgaaaccccatctctactaaaaatacaaaaattaggcaggtgtggtggtgcatgcctgtaatcctagctactcaggaggctgaggcaggagaatcacttgaacctgggagcgggaggttgcagtgagctgagatcaagccactgcactccagcctgggcaacagaatgagactctgtctcaaaaacaaaaaatgaaaaaaggaagtaaaataatactaagccgagggaaggtcattcagtggacattgaagaaggtgtagtgtggtggcagcgtcaaagtgaggaagaaagcagaggctaggtgcaaagttctcaataaatgcagaggagtccccccgaggtaggtggttgacagtagcgaagacagagagaatgtagttcatctggacagtgtgaaccttcccagactaggaaggtggtcttgaagcacttatacttataaatttgttatggagtgtggggggtctcattacttacataattggcatagcactcttatttacagaagcaaaagtagtaatgataaaaataaagttacagcgatccctgtgtgtttactcttatggtttactgatgacattttgcctggaaggtaaatcatttgaggcttgatgtcttgctatcctgagtatttcctatcttaagaaaaactatataagaaaacaaattataattgtcctaagcagaaatattttctagatgtcagagagtctaacttacttttaggatgatacttctctcttgccttccagggaccagatggccctcggggtgaaattggtctgccaggacctcagggtccacctggacctcaaggaccaagtggtctgtccattcaaggaatgcccgtgagttgtgttcaaacattcagacgggttttattgttatctcttttccatgaggttacaaagaatgaacttttgtcttctgtgtcttaataatgaacctcagtccctttgaaagcaatgatggagtgtcatttcactagttgtgcccttagccatttttgtgtccaatgatgaaggtcttttaacaaataagtacatgcatacttattggaggtaggtccatccgcaagcattgtgtctatagaggaagaacaaagcttagcatgtatagccctttttctcgtctaactaaattcttaatggatgtgataacattcagaaagtaacaaatgttatacaaatttaagttttttaattatgtgtagtaactgctgatataaattaataaaagccatttattcatgatccttatctcaaatggcatcaaagtgcagtttatggagagtgagagtttagatttttagatgatgtattttatatagctgcatttctttgaaaagtcattttgtaccattgaaaaaaaagtttaattccattcactgatcttcattaatcttactgtaggagtctagatttaagaataaaaacaatctctttaattcatatttgaagcaaccagatccttttaagcacaatttttggcaatctttctgcacatatgattgtgtctgcctagctgagaagtttctcctacagtgttatttttacattttagaaagcattaacatgccaatttgtgtaattactactaataataaacattggttgaggtcttactacatgccagattctgtgtttgcttttcccttcttatattccatttaagtatgtttctagccaaaacaaaacaaaacaaatctacatagatatgagattgtaaaatccaagccgtaaataatactgaaatgttcaagccgccctgcatgtatttacaatattggccttgccatattagactgtatattctatgttaaaactatcctggtatataaatgttcagctccataggaatgtttacataaatggcataacatatgtggaaagtgaaatatattctgttggccaggcgcaatggctcatgcctgtaatcctaaaactttgggaggccgaggcaggcagatcacctgaagtcaggagcttgagactagcctggccaacatgatgaaaccccgtctctactaaaagtacaaaaattagctgggtgtggtggcaggcatctgtaatctcagctactcaggaggctgaggcaggagaatagcttggacccaggaggcagaggttgcagtgagccaagatcgtgtcactgcactccagcctgggcaacaagagcaagactccatttaaaaaaaaaaaaaaaaaaaaaaaagtgtatatatatatattctgtttagatgttagtgcaaacgcgatttactgtggaaactatttaaataatgagagaaggaaaagaaaacgctaagaatttacctatgtgaacttaactctgtatacttttggatattcagggaatgccaggagaaaaaggagagaaaggagatactggccttccaggtccacaggtattatttttgttttttaagtctattgctctcagtctacaactttgccaagggggaaaaaaaagctgtagcttctgaagtcagttgtgatcttggtaagtgttttccatattaaagactgcctgtattcacttaccctaagccccttttgagagtcacactgatgttccccaggtgagctctgacagggaacattctttgcccatgaataacttctaagtctgaattctaggttacaaagggttcaccattatgctcttaggtttgtttggaggccttcatctatttcagggaagctgcgtgagcagatgactcattcctgtgaacctgactcttttttgtccctgttctacacagggtatcccaggaggcgttggttcaccaggacgtgatggctcaccaggccagagggtaaggtcttgcccaaggttggtttttagcaaagtagtgaccttttcaccaggtcactcttattgctgacaggcttctatgtaagggagtcaagccagtttttgctttttgttttctcctgtttatgtattttccacctatcctgcactatttcccttcactgacatcttctatgttcattacttcgtcaaaccctaggaactttcatcaaaccttcccaaattagcacatccctttccgagtgctcccatgacctgaatacagtttattgtgtgcattggtttagtagatttctccagttctttcaaatccttgaggcataaatgtaaaggaaataaagaaccatatgaattaaaatttaaatagaatggctttctgtagtatggcttacatggcaatctccatttatttaatatcattcaattattggttcttctcatctgttcaagtggacagtagtacaataaagtataaagatattcaggaaagggatacgctaacatctggtatttgtttagtcaataaggttttactgaaccaagtttgaggttcttgttctcaaagagtttatagtttattgggaagaaatataactaaataagaaacttttattacatgctatcatgggagcagagccctgtgagaacacaaagaatgaataaccaagctagacttggaggctggaagaagacttctcagaggaagtaccatctaggctgagtcttgactgaaagatagaagtcagccaggtgaacaaggaaaggaaagctattgcaagcagaggaaagagcatatacaaagaggtagaggcaagggaaggtggagcatttccaatattgtacatcgtttagtatggcagaagattagagtaattgtatgtgtgtgttgaatgcatgtgcacacttacttaggtgtggggagattgttaagagaagaagttagagaggtaagcacaaattcatttaaatcatctattttttccaactaaggattttgaactttaacatgaaggcaataggtagtcattaaattttcagcaagggacacagaggctggtcttccttaaactgtcaccgatttagacatgtgagcagctccacagtttctctcaagactggattatatagagtggcgaccacttagattcaatccaatgaaggacagcacatctggtgttcactggtgttttgggtcgaacttactaggttagcaaacaattgacttgagcacccacttctctactcaaacaaggcttgcttttagctcagggtagctatactgttcaagaataatgaaactgttcttgttttttctatagaatgtagatgcgcaagccttctacatcccccccttttttttaacaccaaacttttgtttgcctaaaatctcagtgtagtctctgttcatcaaatggaattagtcagtccgtgaaatatgtttaggtgaatgtatctgaagaaggcattctgtaacagttagatttatgtagcattcttgtacatgtggaagcagcatctagaaatatttatatattttggcaaagggcgtaggctaagatcctgtgtggttacacacctggattccttcgtgattcctgaagttctgaaaatggcaattctaaagatttagttcggtgagtttatttatctgtgcatgaagtccaatcttggcaaagaactcacaaatcaaacatgttgaattagtgtttgaatcatttggttttggaattctttcttttaacaccaatataccaacacagactttttataaatattttgctatccctccaaatgtgtgttcctctataggattaaaaggcttagagctgtaataaagtgataagatatgtgtaattagattttattttcctttctcttccaatctggaagtcaaacttttagagtatgtctgattcttaatttgaaaacatattagatggaagtgggcttgcttttccaaactagatttctgaggatactcattctttatagggccatgtttaaagaaaagattgtatgattcctgtgatgattcttctagaagagatatttgaaggcaatatcatttcaatgtgcaacacaagcagatgccattcacacagaataaaacataatggtgcccctgaaattgtgtaacatggctgccttgcttgagggaaggaccacatatttttaatcaatcagccgtgtcttcattgagcagatataatatgccatgtactgtgctcagcctggaaagagttgttcattactgcctacagagaagaatccagaagaagagagaacttcaatggcagagggagacagtttgtggactgtttgcctagaggagatggaaggaagggataagaacatggctgttccctggggccagaaagacaaaagggtcttctcagagacagtagagaaggaaagaagaaatgaaggatggattaaaaacggctatttaggtggctctgatctgttcagtcaactgatctgagggcttaaggatagtaaagttctaacacagttagatattaataattactgggcaggattgtaagataggaggcccaggacaattttcatggtgggagacagaccttggacacgaagcaccccagaagacatgctgcattggagggccatctctccctggtttggcagtgggagaggaggtgctgtttatagagtaagcacaaacaccttgcaattattcctgctccacctcaggccatcctaaaaggcaaagctgcatttgggggaaaaaaataattacaacaacaataacaaccgtggcatagaaagagagcaaacgcaggatgatgagacttactgctgaaatgactgagaagacacttccagaaaactccccagtcaggctccactgtccaaaaaatcaggaagccaaagctttttattttcctccactctgagcactgaagtcacttaacgttactgtgcctttatttcccctgtcctgtgtgagtaaagcctactctagggaaaggaggaggaagctgcaacagacattttcaatgatgtttaatcggcgcttttagctccttggacagtgtaaggagtacatgagtgtggtgtgcagtaggagtggtgggctattccttactgctcatttttcttccttttatatttttgccttctcttgtttctttacttattttaattttaatttttagagataaggtctccctctgtggcccaggctggagtacagtggtgtaatcatgactcactgcagcctcaaactcctgggctcaagtgatcctcccacctcagcctaccaagtagctgggactgcgggtttgcaccatcatgtctggctaatttttttattttatttatttatttatttttggtagatatgggggtcttgctgtgttgcccagggtggtctcaaacacctggcttcaagcgattctcctgcctcagcctcccaaggtgctgggattacaagcacgagccacaacacctggccaaatctttgtcttctcttattgacagccacaaacttaaagcgcaaaccaggtgccatcaccttgactgaaagcttatggaaaggttagcacccctttcctgaagctgaagccaatagtacccctgaatttagcctagaaggagagagatcttaacaaataataaaaaggagaagatgaaacatcttttcttctaatgtttctagcttattctggcttttcccaaggggaatctttgactcttagaggtagcttttattcaactctgggcctgaggccataagcaagtctggtaaaaactgaacttcattgaacaagttgcagcctcttgctaggcagccagtagagtacaggaccacactttaaaaagcaatagtgcaagttcatatttcacagccaaatacattgaggcattcagttttcattccaggtcattccaacagaaagcattttcgtctcatctttcatttgcactgtaaatcttgtcactgctgtcatctccttcctcttcttttcttggtatctgtgacttcaggacctatcctgtgatctttgagctcctctaatatatggtggctttctcagtccccaccctagacatcagggtggtcctcaggaaaactaggaagaacaggcaagacatggattacttcatgtttccaagccctcactttcctcagcggtaaagtggaaaaaataatatttgactgcagagaattgtcatggagattaattcatataaagcatttctctataaaaatgtgattttagctaatattagtattcactattttcaaggtaaacttaacaagcctggacatttataatattttataaggcttgtacttgacacgtcgagatgccttagaagactgaagaaatacaaaaattctttttttaaaagcaagttaaaaattttttttcttggatttcacctcacaaggacaccagaagcatgcttctagattatgcaggttttatgtctacaaaggacatatttgtgatgaatatcccatttcatcaaaagtgagttagacttgaaatgcacttgagaaattgaacttgagtcaactatctgggtttaatttttatcataaatgttaagcagtgatgaaatatttatctaagtaatattttgtaaaatactaagattcatgataattattcccttgagcatcttcctccttctgaagaggatgtgtaaataccatcacaaaactagtggagggaataatttgattttcttctttgtggctctggatgggttttataatatcccaagaaagcctttgcacaatcagccacagtgatgatggtatatgcagttgagactgaacagattatttgataaaaatagcagcaaccactatcattacttattgaatatgtgcaggtgctttgcaattatgatgttctctagtcctcagaataactacgaatgctagtcattgttatccccattttacaggcaaagaatctaaagctcagaaaacggaagaaacaatgccacacagctagtaagtgttagagccaggattttaatccatctgcctgggtcctacacttcactctttctttccacaaaattatattagtaaagatcaccacaggattttgttactgtgagaaaatctttctcaaaagagatatttaataagcaggacttcaacacggaagatgttgcgcccagcattttggggcaataggaacccagtgtgggttactttcttgatgaagtagatactgatgcttcacccataaaaatatggtttcttgatcactttacacctttacctggagagtggcacacctgggcacatctgagaagagaacagctactaaaacatattagtttcctgtttttactgactctagagatacttctgggccaggcacggtggctcacgcctataatcccagcactttgggaggctgaggcaggtggatcacaaggtcaggcgttcaagacaagcctggccaacatggtgataccccgtccctactaaaaatacgaaaaaaaaatagcttggcatggtggcacgagcctgtaattccagctactcaggaggctgaggcaggagaatcacttgaaccgaggaggtggagattgcagtgagccgagatcgcaccactgcactccagcctgggcgacagaacaagacttgtctcagaaaaaaaaaaaaagatacttctgaaattgtctttatctgggacacaggcatggtacaaatagtaacatctgctttgcaccctggttctaacactgtccttcagcgtcggcacttgcattttatattggtaaaccagcagtttcctaacttaagtcatcaggttgttgttttgtgttttaatatacagattcctggacttcaatctcagagattcggatacaaaaggtcttaggcatgacttaggaatgtatagtttttaaaagcttaatgattctgataaccagctaggttttggaattgctagatagtatattgtgtgagacctactgatgtcaaagtgatttctttgatagactattgctggcatttttttttgttttaattcactgaagtcatcactgcaggttactaaaaatgtacatatgtttatatttatatatatacacatttaaattataaatgaatatgtatatattaaaaatagtatatgtggactgcatgttctcacttataagtgggaactgaacaatgagataacatggacacagggagggggaaaacacacactggggcctgttggggggtggggttggggaaggagagcattaggaaaaatagctaatgcatgctgggattgatacctcggtgacaggttgataggtgcagcaaaccaccatggcacacatttacctatgtaacaaacctgcacatcctgcacatgcactctggaacttaaaataaaaataaaatagtatatgtggtacatatgcaagatatgcaggcttgttacataggtaaacatgtgacatgagggttggttgtacagattatttcatcacccaggtattaagctattaagcctagtatacattaattatttttcctgattttctccctcctcccatccttcacccactgataggccccagtatggtttgtttccttttatgtgtctgtgtgttctcatcatttagctcccacttgtaagtgagaacatgcagaatctggtttttctgttcctgcataagtttgctatggataatggccttcagctccatccatgtccttgcaaaggacatgttcttgttttttttttatggctgcatagtattctatggtgtatatgtactacattttctttatccagtctatcattgatgggcatttaggttgattccatgtctttgctattgtgaatagtgctgcaatgaacccacccacacatgcatgtgtctttataatagaacagtttatattcctttgggcgtatgcccagtaatgggattgtgaggttgaatggtaattctgtctttaggtctttgaggaatcgccgcactgccttccacaatggttgaactagtttacactcccaccaatagtgtaaaagtgttcctttttctccacaacttctccagcatctgtctttttgtttagttttgtttttaactttttaataataggcattctgactggtgtgagatcgcatctcattgtggttttgatttgcttgtctttaatgatcagtgatgttgagcttttttttcatatgtttgttggctgcgtgcatgtcttcttttgagaaatgtctgttcatatcctttgcctactttttaatggagttgtttttttttcttgcaagtttgtttaagtccctttgagatgctggatattaggcctttgtcagatgcatagtttgcaaaaattgtctcccattctgaaggttgtctctttagtctgttgatagtttcttttgctgtacagaagctctttagtataattagagcctatttgtcaatttttgcttttgttgcaattgcttttggcatctttgtcatgaaatctttgcccgctcctatgtcctgaatggtattgcctagattgtcttccagggtttttatagttttgggttttatatttaaatttttaatccatcttgagttaatatttgtatatggtataaggaaggggtccggtttcaatcttctgcatattgctagccagttaacccagaaccatttattgaatagggagtcatttccccattgcttttttttgtcaggtttctcaaaggtcagatagttgttggtgtgtggtcttatttctgagttctctcttctgctccattggtctatgtgtctgttcttgtacaagtaccatgttcttttggttatcgtacctctgtaatacagtttgaagtcatgaagtgtgatgcctccagctttgttctttttgcttaggattgccttggctgtaagaatgagataatgtccttttaagcaacatggatggagctggaggccattatcctgaggaaactaacacaggaatagaaaaccaaataccacatattctcacttataagtgggagctaaatgttgagtacatgtggacacaaaggagggaacaatggacactgggacctacttgagggtggagggagacaggaggatgaggatcaaaaaactacctattgggtactatgcttattacctgggtagcaaaataatctgtacaacagacccctgtgacatgcaatttacctgtataagaaaccagctcatgtaccctgaacctaaaaaaaaaagtttaaaaataaatgaataagtaaatgaaatgaaaatagtatatatacatataatatataaatagatgtatatgtttatctgtgcatatatacatatacatttttaatgtgtgtgtgtgcatgtttgtgttactgaaaattttcccatgtaacccaatgcaaggattgatcccggatctgtagcctgggacagtgtttacagaatctgtggcttctagttgcttggcctcttaatctggtggttggtcttaatcttttgctgcaagaagcagccttttttcttatggctggctgccacactagtctgcttacagaagtccagagccatgccacagggttgaaattgtgcaacgagggtttcttcaagcatatctctaaccctgactgcttgagcctggcccctttcaacaaattcatctgttgccagctgcttacagatcccactctaaccgagagtgtagcatcagttgaataaccttaacaattggccggaatcttaaggttagtatcatgacctaccattgtcagcttcgaagaagatatgaatgaagaatagtataattgagtcactagttctaagcagtatttccgctggctacagaaacaagtattctcctttctgacttgattttcagttgcaacactatttgtgggcaggtcagttttttttagagaccataggcacagcacctagaaactataaacttttaaagagcctaccaaaaaatgtttagaaacttgaaaaaaagcacatacatttgttctatagtatggaaaagaaaactgcaaaaatggaagttaagaaatgtttaattaaatgtctgtataacaacatggtttgccaatttcagccatggttaaatttagtatttattcaaatattagtgattttgaaagcaaattgtgggtcaggtatacttttgctgataaatcatagccaaccataacttaataagttgctcataggcaaatgtttttaaaaacaaattataaaaatcctttcaagtttttatagcaagaattatttttaatgtggactatgggtgcatattaatattttgaggtaggaatattaaaaaggaaaaatgcctagagctattcatgttatttaaaaaaatccctgtctgtgggtgactaatttcatgcattttttaaaaaagtcagcctaagtgaattcacatattatgcttattgtttaaccttctatttcctaatattcattgtacattgcttaattaagtgttctgctgtttgtttgtttgtttgtttgtttgtttgtttttgagacagagtctcactctgttgcccaggctggagtgcagtggtgcgatcttggctcactacaacctccacctcctgggttcaagcgattctcctgcctcagccacttgagtatctgggcttacaggcgtaacgtaccgcacccagctagtttttgtatttttagtagagatggggtttcgccatgttgttcaggctggtccggaacccccgacctccagtgatccaccctccttggcctcccaaagtgctaggattacagccatgagccactgcacctggccacatgttctgctttatatgaggatgcttaatctctaaacacacatcttagattagctccttggtgtaaaatggaaaatttatagatatagaaaggttttgggacgtgcaagtacttttttagctgttaatagttgaagaccattcaatgagctttgattatagttaagctgaatgacaaagctagaatttgcccattaatttaccctacaaaatgcagttattttacaaaatttttcctttcaccaagtttattgctttctgtaaaaagcttctgctactgctgctcaccctgaaatgaagatgtgagaagaagggcctgaaccctgccctttgaagagttgactggcttgcccagtgagagctgtaacatgcagtggtgtgtgaatagggagactcatgccatggacccaaccattctgattacttgacttaaattccacctcttctgtgaaaatgtctctgtgtccccaagcctgggttaggtgctcttcctagatgtacccgttggaactctatagtctctcagcatagcacactgttggtttcttttcattgtttgactatcctcaaaactgtaaactcttagaagagtgactgtcttgttcatcattgtctacctagagcctagcagaatccccagcatgtagtacctgtacaggtatttctgggtaatatgacaaatgcaagacttgcaaataaaaaatctttcaaaggcaaatttactggtgtcatttaagagtttaaaaataaaactattttatgagatggaaaatgtgaagatctttaattttctagggttatgaagaaattttagaaaaaatggctttgtgtttttgaaatggtgttaaggctaatatccttttagttatcacaatttataataagaaaattttcatttgagataaagcaagcagataactcacagtagacttaaaaacgcctttgttcttggttgggtgcagtggttcatgcccgtaatcccagcactttgggaggctgaggcaggtggattacttgagttcgggagtttgagaccagcctggccaacatggcgaaatcctgtctctacaaaaaatacaaaaattagccgggtgtggtggtgcatgtctgtaatcccagctactcaggaggctgaggcaggagaattttttgagcctgggaggcggaggttgccatgagccgagattgtgccactgtactccagcctgagcgacagagtgagtgagactctaactcaaaaaacagaaacaaaaacaaaaacccacctttgttcttgaacaaatttgttatttgttcttgaaccattatctctaaaagtgtttagttgtttatgacagtccatgaaaaaagtgccagaataaaatgcattgtagtggatgctgttggtgccctgattggaccccctttacttggcaggtgaactacatcaccagctgctatggtgctgactgctaaccactcataattgtccccttctccagataattgcccttggaaatgttatcttggccctcagtcaacgactaactgatttggttcatagactcttatgtgagtcaactctgacgtgtaattcacactccagagctccccatgggatcaggcagaagtttagataactcactactctacctaacctcttccctgtccctaccctgcttccttcactgccttacaggtttcttccaagaaccctcctgcaataagtcaaatacacaaggatctgggtctgcttctaggatcctaaccttaagcttttactaaaatgaaatttcagcttctgagagtaggatgactcctgatgtcttttcgacttgcttgcagagggttcaagagcaaggagaatgacaccagcattcccctcaccctatacatttccagactcattctacctgtgattcacgcttatttcttcgatgtgataagtagagcaggaacctcaatcttattcaaattaagtatttattagtgcaatacttttttttttttttgagatggagtcttgctttgtcacccactggagtgcagtggtgcaatcttggctcactgcaacctccacctcccaggttcaagtgattctcatgcctcagcctcccaagtagctgggattacaggcatgagccaccacgcctggctaagttttgtattttagtagagacagggtttcaccatgttggccaggctggtctcgaactcctgacctcaggtcatctgcccgcctcggcctcccaaagtgctgagattacaggcatgagccactgcacctggccatgtgcagtacctattttgtgtcagtaatgtgttaagaaagttttaggaatatagcgatgaataaaacataattttctgccctcgaaagaagaagagaaagaagaaattccaacttttgaggatattgtttaggtagaatttaaagcaaacaaacatcttatccagtctctgctttatttgtttttttgagacagggtctcactctatcacccagactggagtgcagtggtgtgatcacagctcactgaagtttcaaccttccgggctcaagcaatcctccagagtagctgggactacaggcacaagccaccaggcagagcaatttttttttaatttttttttttttggtagagataggggtgtctttatgttgcccaggctagtcttgaactcctgggctcaagcgatccttttgcctcagcctcccaacatgctgggattacaggcatgagccaccacacccagctgcagcctccacttttgatttgatcacactgaagcactagccctttcaccaaattaagctcatatgtaggagcaacatgtcatccttccagatgatatgcacatgatgtccataaatcaagtgaattcaaacctcttcacaagagtatccttccagggtcatagatgagagcactgacagacttgttttttaaactccttctcacatgattgggagaggggataaatgtgttatttcctgctgttcttccttggaacaatgcaattttctgcagtttcttttctgcagcttgcctccttctgtgaaaaagattcccctcacttgtttttggaatgtttcccctctggacacagccgagcagagacttggggagaactccgcagtaatgctgcagttttggttgctgggcagttgtgttggccacgggtcctctgtgggctcacgcataggtgcatgttcactccctatccagtgctggaagagttttaaagcaggaagcaaaagatgcctttttggaaatgtcttcttaagttagtgaatatgtgcccagggtccatttttctaagaacttcatctgagaaataagaatatattattataaacttataaacttattttaaaaaatgagttaggttttctttcaactctctcttggccccaggttttctcactagtaatatgaaggagttagaatggatgagttctaatgtcctattcatccgtcacatactctgattgctgtttgcccttcttcttggacaggctacatttaaactccatttaacataatttattggctgggtgcaatgctcatgcctttaatcccagcactctggggagttaaggcgtgcagactacttgagcctaggagtccgagaccagcctgagcaatgtgacaaaaccccatctctacaaaacatacaaaaattagccaggcatagtagcacatgcctatagtcccagccatgtgggaggctgaggtgggtggatttcttgcatccaggaggtcaaggctgaggtgagtcatgattgtgccactgcactccagcctgggtgacagagcaagactgtctcaaaaaaaataaaatagtttatttcaacttatatcagcattaatttgtattgtttagttagcaggtctaaggacctgtgtatgtgtgtgtgcaaagtaatctgtatcagggtttatcaatactaatatttttgagtgaagtgaaagaatataagtagtagtaaaaataaaaatactaatatatttcaggattggacagcaattctaataaacaaccctaaaatctcagtggtttaatgcaataaaatgaaatagaatgaaagttcattgcttgttcacaatccagagctgtcagcaagggtgggtggaggagtgggggttagggggtctctgctccacacagtcatttaggaactcagggtctttccatcttggaacactctcatcttcaacatttggcctttaagattgctccagagtgagaaaataaagtgtaaaatcacccactggaaatttttatgagctaaaaactcatactagccccttgaaactagccacttttcattggccagaactcagccatgtggctccagcataattgcaaagagggtgcaaaacagctaagcaatgtgcctaggcaggaaaggaaaaccacaaatattggtgagcccacgcatcccctgccttatctggtttctgacttgctggcattctgaggttgagagtgtggcaaagggctttgctgaccagtgtttctcctccacactcgtcctacccctgtgtattattattctcacgctgctaataaagacatacccgagactgggtaatttataaaggaaagaggtttaattggcttacagtttcacatggctggggagacctcacaatcatggcagaaggcaaaagaggaggaaagtgacatcttaaatgacggcaggcaagagagcatgtgcaggggaaccccatttataaaaccatcagatcttgtgagacttgttcacaatcatgagaacatcatgggaaagaccagcccctatgattcagttacctcccactgcgtcactctcatgacgtgggaattatgggagctacaatttaagagagatttgggtggggacacagccaaaccatatcaccctgcctttgtgccacctctcacactctcccaactcacacaccgtttcctttccctcggccttatcattgctgtcttttatttgacaccttgaggtagggagacataatgtgagtctggacagacctaaaagatggattttctgtcgggtgtggtggctcatgcctgtaatcccagcactttgggaggccgaggcaggcagatcacctgaggttgggagttcgagacgagtctgacgaacatggagaaaccccatctctactaaaaatacgaaattagccagtcgtggtggtgcatggctgtcatcccacctacttcggaggctgagacaggagaattgcttgaacctgggagggggaagttgcgatgagccaagatcgtgccattgcactccagcctgggcaacaagagcaaaactctgtctcacaaaaaaaaaaaaaaaaaaaaaaggatggattttcatggtaaaataagtggaaaagatggctcactggaaaagtggcaagaatgtcagaaagggaattgggagagtctgcaaagatgccaggagaagtttgagttggtttgagatggaaaataattattccaatgggacaccaattccgtggtgaaaattaagtttctccctatagtaacaggtggtgtttggaaaaaattttacgaaattttatgaatatgataaaattcagattgaagattctctcttaaattaactgctttggaaaggccagcattcacaattaagagctataaacatttaggagtaagtcatcccagcttttgtagtttttttaacacttaacataaaaataacacacatacctatatattctataattgaggaagatgtttttataaagaacatcacttgctttctgccttaaatccttccaccagggaatgaggagcaaacacgtgctcatttgtaagcccacgatgacactcagtaaatctgtccagtagtcaaagctcaatcattgccacacgaaatcctcccaaatctcctccagcttactcctgaagttgcagactttccgatattgtagtactcctaatgaaagacagatccctctgatagagattccctgcccaagactctcttaggtcatgaaagatactaattcatcttttcatctggtccttaatgaccaataatggatcctctttccatttgttaggcttagtttagtaaaagcactttttggaagcaagttcctgtttaagtttgtaagtggcatttcttacgcctaaaatttttgcactggacaatttaatggagccaacagtcacaaaaccttgccaaaaacaatttccatgaagagtttaaaggcagtgaatccttggtagtccagagcaagcagcaggacttgacccccaaacatgaaaaggaactaaatgagcccattctgaaagccatataaagcaaccacttgctgacatgctgtgtttcttttcgccagggccttccgggaaaggatggatcctcgggacctccaggaccaccagggccaatagtaagcctttccagaaactactgggacatactctgttttaaagcacttcatttcttttgagaggttttcttttgccagatcttttaccagcagccgtcttcactatagtgtgacaactcatcccttgatagagaactctccctaaaactttttagaaagataatatacccatattgcccaattattctatctctgagctattttgccagaagatcacctgcattgacttagcttttattaaatcacaactaaggcttgaatttgaaagaaccacacctgatatatagtgaggagactaaaaaaaagtcttccctccgtttttgggagttgggaacaggaatgaggtcctggtgatgagggggagggaagctatcatggtgtgtatttgttactcttgcttaaaagttggctgtcattgatgagaatgtgtgattcctgactttgttccattttcctacctctcttctagggcattcctggcacccctggagtcccagggatcacaggaagcatgggaccgcaaggcgccctgggaccacctgtgagtatgcagcggtagctgctcagaatgtaggcccagtcatcacgtttatttatgtgtttaaatttaccagcctttctgttagtcagaaatgtttattcagcactggactctatggaaattcataaaggaaattggaaaagcttctaggataaagatgaagatcagattatgcatatgtcatggctgaagataaatggtcctaaaagggaataatctgtcatgcttttgcttatatgtttctattgcttgctattctgtatttggctaagcaaactcaatatcatctctccagagattgggtacaacagctacgtgttaatcaagctgggttcccaaagggaaaaatagaaagcttgggaaattctaggtttaatgaacgtgacattagatttttctcttccaaattctacaagacagaatttaccagtaaaacacacactcacacataagtgagaggtgttataagtgaaaacataatgaacagaattctttgcctctgattgttgtacttctagtctcttaggttggtgtttaaatgtgatcaatgggagaggaagggataaggtgaaagaaaaacaaatgaacacatctgggcctgtttcttcatctgtaaaatgaggtcatcatattacatggcctctggagacatgcttggcatcttctggtgacatgcaagttgttccttctaggtttagatgttagtcagcattctgatatttatctgtgaattgctaagtctacatccataaactgaaacattgaaaaatgcaaagatgtgtacaactgcaaacacactaagaatgtgtggagcagtgaaatccaatggatgaggatggaagcatctagtgaattagattcctgttaccacttaacaaattgccacaatctcagtggcttaaaacatcacaaatttgttatcttacagttccgcaggtcagaagtctggcgcagatctcactgagttaaagggaaggtgtcggtatttcctttctggaggctagaggagagaatctctttcctggccttttctagctgctaaaggcctcccgtagtccttggctcatgtccacctgcatcttcaaagccagcaatgttgcatctctctggcctttttctgccgtagtcacttctctctgacaacagccaggaaaggttctcttcaggacctatgtgattacattcaggccactgggataatcatagataatctccctagataattcccagatccttaactaagtcacatttgcaaattgccttttgccacataaggtaacatattcacaggttctggggattagggcaaagaagtttgaagggcctttttttctgcctaccatagtaaacaagatgtaacagaaatgttggttctcattcagaaagtggcctctcttcgtctagcaacccagatagtcttgttcctcttattcttgaaactcattttaataaaattatttcatcctcagaatccttttctgggccatgattcatgtgaggcatatgtaggtacacaaacccatacaggttatgcacatacaaaatgcatcttgattttagcaaacacatcctaatttgcacattcaaataaatgctatccttagtaatcactttatacagctgtatctttattccaactacaatgtcattcaaaatacaaaatacttttagatctcttctttttatatcaacctagtaatgggtcacagaagaaaatctgattgctttatcttcacacatctttcttttaattcaaaaatgtgttgcaaagtatgatcctgcacctagaaacatatactgaaacccacatgtgtgaacacatgaaaaaatgcatgcgttcacacacaaaaacacacacacacacacacacacacacacacacacctgtcttcattctttcactgcaagcttatctattcgtttgattctaagctgtttcataccagaaaagaaacttaaaaacatactgtctggtatttggcttcagcctgcttcccagaatgtgctcctgggaaccagagttttagaatacatccacagtgccagacagtaaagggtcctggtcaaagaagtggccctgacatgaccctaactagttgtgtaagccacatgcacagaaactgcatgcctaatctgtttctcagaaattcatgggaagttttaggacatgaaaggctttgaggcatcccgaagtgaaattagaaaacacccaaaactagtttaatttggttagacaataaacgtatttgtgcatgaggttcttattcttactagcatctcctagaactagtttctcctaacccaggctaggaaaaagcaaggtatagagtgatcctgacccaagagggagggaatggggaagaaggaaggaaagaaatgcaggctctgagagctttgggagagttgacatggggcgtggagagctagagagagacctggaatcattgagtaactatgatagcaccctgctcaccgatctggcctttggtggctctggattagactctaaatatagtatctacataaataccaataaaattttcccacaaataaaacacttgttcataatgttatttttgttatgaatcagcagaaaggggcccttgaaagcagcaggaggggcccttgtgccattggtgctttgatcagaggcagaaaccatttggcctattagcatcaggtaggaataccacagctggcttgggcatttcctctcaaaagcaagttgctctctgaactgtccagcccagacttttttgggcccactggctcccagatgcttgctggcggccagactggcatgactgtgacagcaggctccgtgtcatggtgttaaggcctggattgatttcccatggatgtctgtctaggaaggcatgagggaaagggaccaagagggacaggctgcaccgctgaaaatagcaacatgtttcctacagtgggtgccagaaaggcttgcttttgtgcagtctgccttcagctgccggctccctagggcagaatgtacattgctgctgctgaggtcctaattccgatctaagttttaagcactggcttaggtacggttcctccactgcagttgttagagagtgataaagcacacgaacgaaggagctgctcactgctggggccatgtgttcagccaggtagacaggtccagggttacatcattgaaagagtattgcattagaagtcaggatacctgggtccttgatgtagccctgacatgactcaaagtagctgtgaaagccacatcagttgcacaaatcatctagccttttggaatgtcagtttcctaattcattcatttaaaatatttagggaatgagcacaatacatgtaagattacatggtggggaggggttgtgagggatacaaaagatctcaagacatttttcaatactcttgagaaatccagagagaatgatgtttttatataagaagctgtaataaagggcagaaagtgtgaaatgccttaaggcaaagacaagcaaattgctctgaaagctccattaagagagagacccctaagctgaggggtgggagtagcggcttcaggagcatttagatgagatcttagaatatgggtaggaacctaacccacaaagacagaaagattgcatcacttaggtggcagttgcagaaaaacataaggcaaacacagagcacccctgtctctgtacattttaatatttttcaattctttctctagttccatcacgactactgcagttttatttcaggccctgcttgctactcacaaggactatcccaagaggctctcattggccccctggtctctgctttagccctggtctagtccattccccagctgccagaacatcttttagtgcaactccctcgtgtcactgtctggcttcaatctcttccctacccctggaggaaggagcccagttgttcagcagagagctcgtggccctttaggatgggcccctactttcctttccaacttggattaccatcctcccttcacttggagttcagtcacacattatttaaagttcctgaaatatatgccataccatttcacatgtttgtctttggggatgctaacaacctacaggatgctctttgggatgctcttttgccttactgggctgcattctttttcaccacttggtgagctcccggcaaatccttctttaaggctgcacatctcctgtgtaaagccacctgtcccttcgcaggctgttaggtactgcatttcaactattgatgtttgtctctccactaaaaggataattccttcaggatagaaattctatcatattcttgtgcagagtcctagaccccagctcagtgtctaacacatagagagtacttaatatgtatttattaaaagaaaaaaagaaggctgggtggggtggctcatgcctgtaatcccagcactttgggaggccaaggcaggtgaatcacctgaggtcaggagtttgagaccaccctggccaacatggtgaaacctggtctctactgaaaaagaaatacaaaaattagctgggcgtggtggtgggtgcttgtaatcccagctactcaggaagctgaaagacgagaatcgcttaaacccgggaggcagaggttgcagtgagccgagatcataccactgcactccagcctgggcgacaaagcaagactctgtctcaaaattaaaaaaaaaaaaaaaaagaaaaaagaaaaaagaaaaaaaagaaggtacgtttatattctagttaggctgatgttcagaggcatattagaagaatattcttatagattaggggtcaggtcatggaagacgtttcaagccagcctaagatgttttgactctgtttaacagacatctttaatatgtaggacttgaaccacaagatcattcctcttccttccagcgctaaaattcggtgaatctatgaatgtagctgctgtattttcttttctttacatttcgagtgctcctaaaattaaaggaaagtgtgccactttttcctgcctacatctgcagggaatatgtgttttccctcaaagcatactttggtggagttatgggccttcacttgctcaggaatttttattttgtttttgttttactttgtaaaaatcaaaggaacgatgtcagagaagttggaataaaaaataatttcttgccatagagatatttcattaaaaagatctttcactgagactgcctagctgcatcctttggctacttaataaccagcatcatgagactgagtttgaggaatttcaagcccaattaaacacatccgtccctacataccaaaaggtgccaacagctgatgctctccatttaccatgtcaatcaggtttgcactataattgtagtctctagatttgagacattttcaaacaagccagtttaataaatgatagcaagaatagcaagaaaactgtcaaaaaatgtattggtgcagaaataaaattattcaagataaaatagattttaaaaaaacgactcaagttgcaccctaattctgaattactagagttagtccttaggcatggtatgtttgcttgttttgcttattttaattgagaaaatattatcttccctggaatagaagacatgagctggcagaattgctaagcagggttctctttcaacagagtggtagagtgtactcgggatgtgcatggattctggagcccacaatttgggttcaggtccctggttttttcacttccttattgcctggccttgagcaagtgacaagacctcttagtgcctcattttccatatctggaaaataggaataatatagggttgttataaagaataaatgagttaatcttataggagtattataagcactaaataagttaatcttataggagtattgtaagcactaaataagttaatcttataggagtgttataagaattaaatgaattaatcctgcagagctgttataaggtttagctgagttaacatgctaagaacaaggacagtgcttggaacatggtaaagcagcctacgtatcagctattagtatttagagtgtcataatgtattaaaatatggaatatttattatttgctgatttttttgttttgcctctaatatttgacaaactgtttccgttaaggattatttagtggtaagatggtagttcttttctccagttggtccttccagtaaacactaatgtctctttagagatctgtccatttgtgaagcctaagaaatgagggaagaaggcacagccagtacatttatttccaaaaagaatttgggctggggcaggggtgtgctatgtaaatcttacttttgcaaaaaaaattttatgatggaacgcctcccaggttcaagtgattctcctgcctcagcctcccgagtagctgggactacaggcgtgtgccaccacaggcacgcgccaccacgcccggctaatttttgtatttttagtagagatggggtttcaccatattggtcaggctgatcttgaactcctgacctcgtggtctgcccgacttgtgatcaaggcctttgcgatcctcccaaagtgttgggattacaggcgtgagccaccgcgccctgccatcttctgtcttttttacagtcagggtagttgaaatgaagcacaaattggcttgccattcaaacttgaagtgaaattcagccacactacatcctcagaaggatcctttgtgaggatcttctttctctgtagaggttggaatcctttcctcggaagcccagactttgtatttttcatcaatttctgtttcctgtgctccctgcttctgaataacgaccatatcatgagagaataacgtgttagactgataagggaatcccagagatcacttcatttagtggcctcatcttacaaagaaactcagagagttaacccagcttgcaggtccaatgtcctacattctttccaaagtattagcataaaaaaattttaaacacacacaaaatggaaagaattttgagtgaacaccacacccatatatccaacactaagattctaacatcatgtttaaaaaaaaaaagtgttggccaggtgcagtggctcactcctgtaatcccagcactttggtaggctgaagtgggcagatcacttgaggttcaagaatttgaaaccatcctggccaccatggtgaaaccccgtctctactaaaaatacaaaaattagccggatgtggtggcacgcacctgtagtctcagctactcaggaggctgaggcaggagaatcacttgaacccaggagccagaggctgcagtgagctgagatcgtgccactgcactccagtctgggagatagagggagactgcgtctcaaaaaaaaaaaaaaaaaaaaagtgtgtgggtgtgtatgtgtgtgtatgtggtgtatgtttgtgagtgagtgagtgtgtgtgtgtgtgtgtgtgtgtgtattgaatagacatagcagggcaagggaggagaggagagaagatagagccagggtgggctgcttatatctgcactggagagtcaatcatgcatttctcttcctttccaattccatcttcagtgacagcacatttgtagcttgaaatcagctgtgatagaaacacttacacctccaaaatcagcaagcactacaagtcagggcattttctttttctgggaagccagtttacctgcacactgtgggatgaaaccagaagtttgaatctgggcaactggtcactgactacagattttgaagaagataccgagtttggcttgggacctgtttgaaataacaactggaaacagtctgacaacgtggcaaattccattaatgaattccattcactctccttttagtcgagactataaaaatgttgttcaatgaacattgcctcagagttgaaacaaaatatgaaatccttctgaagacacgtgttttgcattagatgtatgatttttttggaggaaccctgaaaatgccatttttaaagtagatgcgctttaataacggcaaggtttcttatgggtgaaagagtagctaagccacataataaaataataaatcaattgagaagtcacataaatgtgagctcccatattggggagaattagggagaattgtgtggcatcgtgctgcacagaaatcagagtgaagctctgggatttcactaatctcatctctgacttgaactcctaaattgagaggtgatcttttctatccttttggagatattcctttaaaaactgaaacaatttaactattcatcagagatttgtgaaataaattatgaaggatcctcagtagaatacagtacatagagtggcgtttagggtggaaagatgcaaaggacctacacagtgaaaatatgtgttacaaagcaatattattgctgcacgattccaattttgtggccaaaatataccatgtctctgcataaaaaagctgaaagggtagaatgcttaacagagctttttatgtttggtgtgcgtactggttgctgtttattttctgttgttgtgtaatgatttttgctgcagaattactggtgctaagaaaaatgtcttaataaaataagaaaagatgcatgattatcactcttagctaagtgcaatatcataagtaacttgacaattttccatttatacagggtgtccctggagcaaagggggaacgaggagagcgggtaagtatcctgtggctctgctttctggccccagcttgttgcaccccttccattgcataagcctgataaaggatcatcatttaataccattaatattcattgcaattgtaccagtctctgtttctccctttccccaattcattagactgtggccatattttccagacataaaatccctgtgggctgggagtcaggagagctagtttctaattgcatatctgctaccatccaggtcaatgaacttgggctcttttctttaaggataaaatggagagaatcaccgtcatataatttacaaagtgggtttgatgagaacgttatataatagatgtgaaaaggcttcagaaaagtaaaaactctatacaagtgacaagtggcagcatggcactcctgggctttttgatgctcccaggttcacacccaggaagacaatggcaggcatagaatcaaagaactggcccccaaactgaagtcagcttaatttaagggtcgtctctctcctttcagcaattgtgcagctgctaatataattgtgccattggctatagcagaaacagcagtggccttgggctcatccaattacctctgtgaaatcttgggccatgtgtttaatgctattcagctataaaatgggtttaacatctttcctctgggttgctattagtattaaatgagccactgctcgagaaagtgctgtattttataagctctaaagagctatatatcacgtgttaaatatatatgggtttgtttcaaaactattaaattttttagaataggggaccagaaatacttactagtgcttgttaatctaataaggactcccaggaaccttgaaccatgaatatcaaattgcttaccccttctctgcatgcaccgtggtggtcaaacccacctgttgctaggggccaaagatccctgatgggaacaatggggcaagtcagatccacatcctggaagtcctggtagtgtggctgggcttgtagctgagtcaggagtatgctttttttctcatccagggtgacctgcagtctcaagccatggtgagatcagtggcgcgtcaagtatgcgaacagctcatccagagtaagtatgtaatggttacggaggatgttccccataacaaactctcatccaaaagagagtttcttttcccatgagcgtaccactaaggaaaactctaaagcattgtctttgtgcagacacataagctttacagatgaccatcactgacccatcaaagagatcactgcagattaccctagagctctacatcgatggtacaaaagccaaattcctttgtgtcattggtccaagaactgcctgtttgcccatgtaaatttaacttgactgcccagatcagatcttctattcctttctcatctttccaggtgggtaggattttttctcaagtgttcagcacttgaaagctgccagactacatcttcagaagctgcctcagaaagacaatttatggtgttgatttttattaacttgcaagatttaaatgaatatttccttcttatccatttcacatccattaccttctggctagcctaaggtcttctcatttatttcttaagatgtttatgaaaatacaaacacacacatgaacaggcttgctctgacgtttgatatgatattatacttgggctttgtgccaaaaattacatcataacaaacttgatatgacgcctgtcccatttcttcattttacttgagctttttgatagcactgtatttccctgcccatttgcttagatcccaccacttttgcacgtttctgctctgcccactgattatatattttatcacagtaatctaatcagatggttactagtgtgggcccttcgctttgccagtaatttgttcagttccaggaatatctgaggccaagcagaggtgaactatctctctcaaccccacccagctctcgcctagctctgctgtccagccctctcacccaatagcacccccacttccagggctgacattacccaggtgggtacctcattggcttggggttatatttattttaactcaagaaagtttgggagttaggccaggaagccctgcaatatctaagacagctttgttggctaagtccaaaattccatctttaattctgagataaatccaaatctcaccctggaggaggcatggagttgagatctgcacaggcttggaagagttttcattaaggcaaaaacatcagggcaagaggagtatgaagataccaacttcagacacagtagtcatgctccctgtattttaacgttatttaattttctgttatattgcccaaactatgtgtgtgtctgtgacagagaatttaccagttaaatataactgtttaagtttaatggcaaaataggatctttaaaaatacattataaaagagaaattgaacattaatcattttgtactgacatattgtaaataacctgtatcttgaattgttttttagatttctgatttcaagtgtacaatgtaaatgagcagatcattattttcagaaaacttaaggcttaaatcttactatgactcactgaccactacccaagaaagatctcacaatacttgctgtcttattctactgtagaataaaaatcatgtgtaaatatctgattatttaaagcatgccctaaaaatcaagggttcaaaatcaattttttctccttacgaattctcagagtcttgtgattgacttctaggaagtagaagtcatcaagggattggttacacagtaaagcttaaacaagtctataaaatagcaaggccctgcctgtcaatatactagaaggaaatcaaaaaggttgtatgcaactcgataagccaggcccagcctactcagaggctgtatttctggtacctcaaccatcttgccttacactacttcagttttctctgggatccttattgtattccttcagctgccactcagaactggatttatcagttagcaaataattcctcacaagctcacttctctggtttttagttcacagttgatcagaattatgctaggaagagttacatgggaaattatgcaaggccaaagtgatgacagctgggaaaatgatgatggacagtccccatgtcaaaggcagaaactgaaaaagcaaatgaggaaatgtctcacctgcccaggcaacaatggacgtgcctactaataacattgagtcatcaggagcggatccctacttacagtgacaatccaatgcttaaggaaagaatgcactgaatgtattttagagtgaattccttgaagaaattgttactatttttatttagttttaaatgtttcaaaatggataaataacagtaaactagaaaattcacttatgttgggaaaactcctctcctaatgatgttggaaaaatgagacatcatggtatcaagtactttatacttctgattagtaacatatatctgtatatatattttccatacataactgagttaagggattgtgggagagagtgccagattttttaaaaatataaagctagtgggagtttctgcagctgagacccaagtaaaggttcctaaaaaaaggcttgatgaccaagagatgagttgagacagagcacttgtctggggatttgtgagcaagagggtggggaggctttgtgcgttttagaaaagaaaaataacttggggagtaattgctagagaaatggcagctgggtgagggtctaggggtcagataaatgttgagggtaaagatgaaatttacaacttctgctcagtgatgtttattgagatgctgacatgagctgcagaattccaaacacatgagatgccatttgacaacagtccagcccttaatatcatccagagtaaaacgtaaaaaaatgttaagctggaaatcaacatatttcaaaggggtgtgatttttcccttggtgggtatctaacagaattgtttgcagccttaacaaatgacacccctggtcctctctttccttgtgtgacagttcactgaatgctgtctttatgcttcatacctcaggtcacatggccaggtacactgccatcctcaaccagattcccagccactcctcatccatccggactgtccaagggcctcctggggagcctgggaggccaggctcacctggagcccctggtgaacaaggacccccaggcacaccaggcttccccggaaatgcaggcgtgccagggaccccaggagaacgaggtaagctgggccccttctctcagaggaactcctctgagttgggtgcagggaagcagaacattatagtggttcttatacaaggataaagtctgaaacaatggacttaaattaattctgccccatctattcttcagtttcttgtttatttatctctgagattgagaaaattgagcaatctgccaagtggttatctagagccatatctacttatatgaaagaggaaggttagaacccccaaatcacttctgagagtatttgagctaatgaaagaaagataacccctctagatggatgaagtcaaaaagggtgccccttccaggttgaagaattggaaaatgatgccgccctctgaccaaacatggcatcacaccaatgtcaaggcaagcagagaactcactctggtgatttgctggtgctttatttgtgtggtgcccagactgggcaatagtcagtggcagtcctgagaagagtcatgaattgtatcagcatatggttcacatgttcctgtatagaccatgtcagctctaaacttcaaattaaaatactgtctgcggctcatcttcctattatatcagacaacattttatttaatagtttcatgggccaatgttttgcctttcccactaaagtttccttaaaacagagattctacttagccttttcttccacatctacaggtcttagaagtatggtgtaatacaataataagactcttttgactgaatctatagtcgactaagatattccattccagaagcaggtaaaggagatgtgggaagtcagggttgcatgttaaccgtgaagaaagtgatgggaaagagagacaactcatcagagtattttctaagatacattttgtagaacatagacctggggaaaagctaacttttacctatctgctctgtgaggcatattagttttgtgggatgggtaggatatattccttttataaaatttgatttaaaatacagattacaaaaactatttcatatttattttgactcatgctaacaggccttgtgtatttctgcctctgcacttttgtacacattgttttccctctttggaaatgtcctttccttcctttgtcttccatacatcttactcttagttcaaggctcagctgtcttatgcatgaaattgttattgatcaccccagaacccaaatgtctccgcccccatgaacacctgatgcccttactgtcttttctttctgttttagcactcatcaggcattagcgaacagccaggttgttgagagcagggattggttctgaattgctttgcacaatgctttgcacttaataggtacttactagatagttgttgctttaattgtgacccagttctgatttttctttctgaaagtttttccctgtgtcagggcacaaaatcagcagatatagaaaatggcatcattccctcacaacacaccaaagatctggcagcctggaatgtggccccctctgtcagcagggcatcctctgctgctgtcaataatggagaaactgtgactcagtgagcacagagccagcacctgagtcattcccagcaagtcataagttgtctttgttctttttggaagtcttagccccgttcttgccagaccgagtctctcctgctctgcaagtacacttgaatgattagaccacagaaaaatcacccaaggattctcaaagggcagcccagacgacctttggaaatatgaatttccatgatgtaattttcttacatacatattgatatatattctaaagagtacagtagacaagcagaatcctatatttcacaaatgcataaaagatgacagtaagacagaaagtgagaaatgccctttgagcatggggaaaggtgattttagttgatgaccacttgaagggtgtgattttgcgatgactgttataggtcagggcttataggccagcatccaaggggctcctcattcccggcaaagttatttcagctgcagcttggatttgctgctgcaaggtaggcagtgatgtttgggatccaaatatccaggaaagataaagagaggaaaggcctgtctttccactaagtcaaaacaataaaatttaaaaactgaagtcttcagctatcttttctcttctcattttctataaaaggaagcatatgaagatattgaagtaaggccaaaaaggctcaaagtcagccaacatcaagacttgaaataagagccagagactgtgttgtttttttctgctgtataaaatatgattatcatcattctggataaaataatgttataaggacacaatattgtaatgagtaaaaataagtactattaccaggcagtgtatgtagcacataatgaactacaaaagcaagattatgagaaatatggctgttgagcattctggcatgaacactgaaatgaggctcactttctgcttaggcttcctatgagcctcataggagtcttcctaaaaaaattcactactgggtatctacccagaggaaaagaagtcattatacaaaaaagatatttgcatatgcatgtttatagcagcacaattcgcaagtgcaaaaacgtggaaccaacccaaatgcccatcaatcaatgagtggataaagaaactgtggtgtatatatatatatgaagcatatataaagcatatatatatgtatatatatgaagcatatataaagcatatatatatgtatatatatgaagcatatataaagcatatatatatgtatatatatgaagcatatataaagcatatatatatatatatatgtatatgattgaatactactcagccataaaaaggaatgaattaatggcattcacagtaacccagatgagattggagacgagcattctaagtgaattgactcaggaatggaaaaccaaacaccatatattctcactcataagtaggagctaagctatgaggatgcaaaggcataagaatgatacaatggactttggggactcagggggaaagggtgggaagtgggtgagggataaaagtctacaaatagggtatagtgtatactgctcaggtgatgggtgcacaaaaatctcacaaatccccactaatgaacttatgtaaccaaacaccacctgttccccaataacctatggaaaaaaattttgtttttttaaattcacaactccattcagtttggatagtttttcatcagaagtgcccactctaacttttctattctagtttttcaaacttttaaaaatgtgatacacagtaaaaaatacatttgacatcatgatgcaatattgcttatgcatatgcatgcatgcaaatgtatataactgggacaaaagaaattatttttacccttcctgttattccctgttttcttcttttgttaaaagaacgaggagagaccttgggtttcattaccttagtttgaaaaacactataccctaatgtccctgtctgacagctttgaagggagcagtggttctcccagcacgcagctggagatctgagaaccggcagactgcctcctcaagtgggtccctgacccctgaccccgagcaggctaactgggaggcaccccccagcaggggcacactgaaacctcacatggcagggtattccaacagacctgcagctgagggtcctgtctgttagaaggaaaactaacaaacagaaaggacatccacaccaaaaacccatctgtacatcaccatcatcaaagaccaaaagtagataaaaccacaaagatggggaaaaaacagaacagaaaaactggaagctctgaaaatcagagtgcctctcctcctccaagggaacgcagctcctcaccagcaacagaacaaagctgggtggagaatgactttgacgagctgagagaagaaggcttcagacgatcaaattactctgagctacgggaggacattcaaaccaaaggcaaagaagttgaaaactttgaaaaaaatttagaaaaatgtataactagaataaccaatacagagaagtgcttaaaggagctgatggagctgaaaaccaaggctcgagaactacgtgaagaatgcagaagcctcgggagccgatgcgatcaactggaagaaagggtatcagcaatggaagatgaaatgaatgaaatgaagcgagaagggaagtttagagaaaaaagaataaaaagaaatgagcaaagcctccaagaaatatgggactatgtgaaaagaccaaatctacatctgattggtttacctgaaagtgatggggagaatggaaccaagttggaaaacactctgcaggatattatccaggagaacttccccaatctagcaaggcaggccaatgttcagattcaggaaatacagagaacgctacaaagatactcctcgagaagagcaactccaagacacataattgtcagattcaccaaagttgaaatgaaggaaaaaatgttaagggcagccagagagaaaggtcgggttacactcaaagggaagcccatcagactaacagcggatctctcggcagaaaccctacaagccagaagagagtgggggccaatattcaacattcttaaagaaaagaattttcaacccagaatttcatatccagccaaactaagcttcctaagtgaaggagaaagaaaatactttacagacaagcaaatgctgagagattttgtcaccaccatgcctgccctaaaagagctcctgaaggaagcaataaacatggaaaggaacaaccggtaccagccgctgcaaaatcatgccaaaatgtaaagaccatcaagactaggaagaaactgcatcaactaacgagcaaaatcaccagctaacatcataatgacaggatcaagttcacacataacaatattaactttaaatgtaaatggactaaatgctccaattaaaagacacagactggcaaattggataaagagtcaagacccatcagtgtgctgtattcaggaaacccatctcacgtgcagagacatacataggctcaaaataaaaggatggaggaagatctaccaagccaatggaaaacaaaaaaaggcaggggttgcaatcctagtctctgataaaacagactttaaaccatcaaagatcaaaagagacaaagaaggccattacataatggtaaagggatcaattcaacaagaagagctaactatcctaaatatatatgcacccaatacaggagcacccagattcataaagcaagtcctgagtgacctacaaagagacttagactcccacacattaataatgggagactttaacaccccactgtcaacattagacagatcaacgagacagaaagttcacaaggatacccaggaattgaactcagctctgcaccaagcggacctaatagacatctacagaactctccaccccaaatcaacagaatatacatttttttcagcaccacaccacacctattccaaaattgaccacatagttggaagtaaaactctcctcagcaaatgtaaaagaacagaaattacaacaaactatctctcagaccacagtgcaatcaaactagaactcaggattaagaatctcactcaaagccactcaactacatggaaactgaacaacctgctcctgaatgactactgggtacataacgaaatgaaggcagaaataaagatgttctttgaaaccaacaagaacaaagacacaacataccagaatctctgggatgcattcaaagcagtgtgtagagggaaatttatagcactaaatgcccacaagagaaagcaggaaagatccaaaattgacaccctaacatcacaattaaaagaactagaaaagcaagagcaaacacattcaaaagctagcagaaggcaagacataactaaaatcagagcagaactgaaggaaatagagacacaaaaaacccttcaaaaaatcaatgaatccaggagctggttttttgaaaggatcaacaaaattgatagaccgctagcaagactaataaagaaaaaaagagagaagaatcaaatagacacaataaaaaatgataaaggggatatcaccaccgatcccacagaaatacaaactaccatcagagaatactaccaacacctctatgcaaataaactagaaaatctagaagaaatggataaattcctcgacacatacactctcccaagactaaaccaggaagaagttgaatctctgaatagaccaataacaggagctgaaattgtggcaataatcaatagtttaccaaccaaaaagagtccaggaccagatggattcacagccgaattctaccagaggtacaaggaggaactggtaccattccttctgaaactattccaatcaatagaaaaagagggaatcctccctaactcattttatgaggccggcatcattctgataccaaagccgggcagagacacaaccaaaaaagagaattttagaccaatatccttgatgaacattgatgcaaaaatcctcaataaaatactggcaaaacgaatccggcagcacatcaaaaagcttatccaccatgatcaagtgggcttcatccctgggatgcaaggctggttcaatatacgcaaatcaataaatgtaatccagcatataaacagagccaaagacaaaaaccacatgattatctcaatagatgcagaaaaagcctttgacaaaattcaacaacccttcatgctaaaaactctcaataaattaggtattgatgggacatatttcaaaataataagagctatctatgacaaacccacagccaacatcatactgaatgggcaaaaactggaagcattccctttgaaaactggcacaagacagggatgccctctctcaccactcctattcaacatagtgttggaagttctggccagggcaatgaggcaggagaaggaaataaagggtattcaattaggaaaagaggaagtcaaattgtccctgtttgcagacgacatgattgtatatctagaaaaccccattgtctcagcccaaaatctccttaagctgataagcaacttcagcaaagtctcaggatacaaaatcaatgtacaaaaatcacaagcattcttatacaccaacaacagacaaacagagagccaaatcatgagtgaactcccattcacaattgcttcaaagagaataaaatacctaggaatccaacttacaagggatgtgaaggacctcttcaaggagaactacaaaccactgctcaaggaaataaaagaggatacaaacaaatggaagaacattccatgctcatgggtaggaagaatcaatatcgtgaaaatggccatactgcccaaggtaatttacagattcaatgccatccccatcaagctaccaatgactttcttcacagaattggaaaaaactactttaaagttcatatggaaccaaaaaagagcccgcatcgccaagtcaatcctaagccaaaagaacaaagctggaggcatcacactacctgacttcaaactatactacaaggctacagtaaccaaaacagcatggtactggtaccaaaacagagctatagatcaatggaacagaacagagccctcagaaataacgccgcatacctacaactatctgatctttgacaaacctgagaaaaacaagcaatggggaaaggattccctatttaataaatggtgctgggaaaactggctagccatatgtagaaagctgaaactggatcccttccttacaccttatacaaaaatcaattcaagatggattaaagacttaaacgttagacctaaaaccataaaaaccctagaagaaaacctaggcattaccattcaggacataggcatgggcaaggacttcatgtccaaaacaccaaaagcaatggcaacaaaagccaaaattgacaaatgggatctaattaaactaaagagcttctgcacagcaaaagaaactaccatcagagtgaacaggcaacctacaaaatgggagaaaattttcgcaacctactcatctgacaaagggctaatatccagaatctacaatgaactcaaacaaatttacaagaaaaaaacaaaccaccccatcaaaaagtgggcgaaggacatgaacagacacctctcaaaagaagacatttatgcagccaaaaaacacatgaaaaaatgctcatcatcactggccatcagagaaatgcaaatcaaaaccacaatgagataccatctcacaccagttagaatggtaatcattaaaaagtcaggaaacaacaggtgctggagaggatgtggagaaataggaacacttttacactgttggtggaactgtaaactagttcaaccattgtggaattcggtgtggcgattcctcaggaatctagaactggagataccatttgacccagccatcccattactgggtatatacccaaaggactataaatcatgctgctataaagacacatgcacatgtatgtttattgcggcattattcacaatagcaaagacttggaaccaacccaaatgtccaacaatgatagactggattaagaaaatgtggcacatatacaccatggaatactatgcagccataaaaaatgatgagttcatgtcctttgtagggacatggatgaaattggaaatcatcattctcagtaaactatcacaagaacaaaaaaccaaacaccgcatattctcactcataggtgggaattgaacaatgagatcacatggacacaggaaggggaatatcacactctggggactgttgtggggtggggggaggggggagggatagcattgggagatatacctaatgctagatgacgagttagtgggtgcagcgcaccagcatggcacatgtatacatatgtaactaacctgcacaatgtgcacatgtaccctaaaacttaaagtataattaaaaaaaaaaaaaaaaagaaaaacactatccccatacaatgtctttgattaaccccatctttgtcagagaaatggcaaagaatatgcatttttagagagcagaagaaaaattatggattttcctttcatgttcgcaatgtgatgtacatggcttttcatgacttttcttattatctaaaagaagattgcacttttgctccatctgattgtctctctcttcagtaaccctttgtctcctttaacttaaagtctttttcgtaagtttgtgtggaacagtttttagctatcctcttacacagattgtaatagagaattcttaaaatttaaggattctaagggatccagtggctaatgttgttcaagttttctatctgaagcttgaaatcccacttagatttttctaattattggcacttagcattgaagaggcctcatttgcataacatcatgctttatattaagcagcccgatttctcacctgcttttccttgtcacttgttcttctctgttaatttatgtcaaagaaaagctatttttccatgggatgctagttggttacctctccccattaaaccctgtactgtcttcatgtaaatggttctgtataacctggcttctcattatcctaaaattcagaagagaggaccagttctgaggttcctcttttgatcactgaaccgtgacaatccagtgcttgactggacaatccagtgattgactactatttgtcaattgcttttctgacgtcaactcactcttgagtcacatttttgggtgattccaaaccagatttcctcaattacagatcgttttctttttctgctctgtgcatatcattcccagatgattcatctgtttttgtttactcaatttatttaaatgttcattctctacactggtatcttgagccatatattaaacaagtcaacaataagtttgttggtttatagttcacaaaattaagtttctttattcagttgaaaagaattagaaaattcccctaatttcagtctttttttttttttctcttggagacagggtcttgctttgtcccccagactggattgcagtggtgtgatctcggatcttggctcactgcaacctccgccccccgggttcaagcaattctcctgcctcagcttcccaagtagctgggactacaggcaggcaccaccacacctggttaatttttgtatttttagtagagacggggtttcaccatgtaggccaggctagtctcgaactcctaacctcaactgacaacccccccaccccgcctcggcctcacaaagtgctgggattacaggcatgatccaccgcacccagcctgatttcagtctttatgcaactcctttagtttccataatcctcccgaaatttttgaatcagagaaaccatctgatcatctaactaacctaaccatctaaagattttcattttagattgtatagctggacagctggaatttatatctggtttatcttatagaataagtcagcaaatattaaatgcagtgtttatgtaaggtttttcagtttggcagatagataatactattatttatagcttttacttattaggctccaattgcatctgccaagtgttgcgctcagtcctgtacacactacctcatttgggtaaagtggaagacctggtttggataaggaaggaatatgaaagattgctgagggtacaaactggaagatggtaaatgctaagtgagttatatagaatataaatggtttcagaatgtaaaggaagatgtcagtcactgtggtctttgagaagaacgggtgccagcatttattaagcaactatgtgtcaattgctaagcatgttatgtgatgctcataaaaatcttatgagatcaggattagttccatgttaggtgaggaaactgaggctctgctagattgttaattgtccaaggtcacacagtggaacaataggggtctagaattcagatccagatatgtatgattccagaatgcctgtgcttgctggcttcgccacttaactagctatgtgatcttgactacttaagcttaaaacttaatctctgaaactccattcattcattcagtggtacttactgagcatctactacacttccagcttgtgctgggcattgatgacatggtggtaaacagggtatatatttcctgactttcatggcaccttactgttatgggagatggatattaagcaaacaacatatcaatcatttaatttcagttgtaattagtgctatgaaaaagtacaggataacatatcctgtactccagccaggagtacagagcactccagccaggtgaacagagcaagactctttctcaaaaaaaaaaaaatctgctgaaatacatgttgccttcttccttctttgattcaccatcccctgcctctcatttcttgaaagatgaatacagatagttttctctttcttttttccacccaggactcatctggttaagttcaatttgaatgcccttcagaacaagacctttatctgaaggtctagtggattgtgttttcctaatggtgtagtcattttaaggcattgacaaggattgctcttctttttcttctttgcatcatcttttattgattttttttattacaaagcgactctttacagtgatcatggctgcagaaagaaactcttatgtattagtgagctattgctgtgtaacaaattactttaaaacttagtggcttaaagcaacaaatatatatgatgtccatttttgtgggtcagggatttgagttttacgtgggtcctgttggctaagagtcttgcataaagttgcagtcaatatgtcatttaggaggccagtcatctgaaggctcgactggagctggtgcatctgtttccaagatggtgccatcacaggactgttggcaggagtctccagccctggctgatgattggcaggagggctcagttcctcactgtggagctcttcgtggggcatggttgagaattcattttcaacgcatagaggctgctttcctcagagccactgatccaagagagagagcagaggagttcccattatgattttgacatctagtctcagaagcccaagcttttactttcaccatattctatttgttagaagggagtcactaagcctggcccacactcaagtagagaggaattcggctgtacactttggagggaggcattttaaagattttgtcagtgtctgtttaaaccatcacactcttctaaattaaaacaagtccttctggctgtgcattgcgaagagggtgatgctctcatccacgaaatgattgccaagcagtatgacgtctacagtgctgaataatgaagggctcttgtgaagagttggcttaccctgcctgttttcaccacttatgtttgtttttctctcctgtattcttttaaatcatccaaatgtcagatgtaggttttcagagggaaacgcaagatgcagctgtgggcacctttaaaaacagtagcaattattgggaaaaatgtttttgaagactactaataccttttgtgttcctgtttctgaaattagtcataattagaacaaaatccattttcaaaccaaacacaaagaacgagagaaaaaaagccattgacaaattaaaattaccattaaattatgttcccaccctttataattagtaaaatatgactgttacagtaataataagctataactagtgttttgtcttgtttttgccatggaagctaatatcattgtttctgtagataaaaaaattttaaaaccttaattgaaaagtctattagtcagtttgaacagatatttgataaatcaatggctgattaatcccaccgcattagtgtgtgacacatgtcattcaatacccagatagagtatgctttcttgaattggcccttattgatttctctctgttcatcctttcttacaatgaggctacattgtcccccaaaacaaattttaatgtacatttttcttttattcctcataatacatgaaatacaatagttatttcataagtcataactagtttatagtgttgataacctcttggctagctttttgactgccatttctcattcacaccttgagccctgataaaaacaaaagcccatgtggatattgtgcctcaatcctgagacatcatggtgacagcagattactgccacgtgaacaatgtaagcatttcctttcaagtcgtcatcgtgtaatttagccagaaaatcatggcaagttttctaagaaggagatttggttatactagataataaaagagagagagagaaagaaactccttttttaaaaatgtaggaatgtatttcatcattttctaaattttcaagccttgaacataagtaaaatggaaatataatgtagtttatatgataaaactaaagttgtttgtattagctgtgataaaacatttttggtgaattttttgacatggctttcaaagccatgactgtaataagttaattatcaaaatatatttttagaggaaggtgaaaacatgcagagaaaagatatattcattaatcctttccattttcattgttctagatttgactttggcattaaattactatgtaaatatagtgaagtagtttgactttcctgaacttctttgctagtttggaaaaacataatgagtatccttgattttggatgtgtttatcgtttttttttttatgttaacttttgggatacatgtgctgaacgtgcaggtttgttacacaggtatacatgtgccatggtggtttgctgcacctatcgacccgtcatctaggttttaatccccgcatgcattagatatttgtcctaatgctctccgtcccctttcccccaaccccctgacagcccccggtgtgtgatgttcccctccgtgtttccatgtgttctcattattcaactcccacttatgagtgagaatatagtaatgggtctttcatgctgagcatgaagtgctgttggtcataacacattttattttaaattctgtagaccctgaccttatcccaatgcctggacacagctcacttttccaacagtggagagcatcatatcattttccagttctgcaaggaatgaagaccaagctccaatttaaatattatcaactggttgactattcatgctaaacctgaaatgttcatttttaagccatagaaattggctccttttcccactaattttgaataatttataattttcttaatagccaatagtggaaataatataatagctcttaaggaggaatgatcaaaattttgtagcagaaagtaatagattggcatttgatctaacattcttatgtaccagtgaggtcatagtgtcagcggcaaaactgggtgaacaaaaagcccggattcctgatgcctgatttaatgcctattttctcctgccactcacctgcagttgtgaatggtcaacctgcagactacagtaggctggtgtgcactgatgagctttgcacctcatcttctctctctctctctccgcccttctctttttaacttccactcttcctacttctcctctttccttcctactgcacttcctccctctcgctgcccaaatttaggtgagtctgtggtcaaaataccaaaggaccctctacctatactgtcttgactgatagagactaatagaaagacctgaagtgctaactcctttgccttgatcttgctctggttagtggattcctttgaccattgagtggccccacttaatgattcaacctgttttcctctggcttttctgtggaaatagcacagggtttaccagtggagctaggctctacaggactccaggctgccttaaccaatgtattgccttgtagcacccagaaggagcagatacaggttttgtggaacctgaagcttacgacttggggttcctcttgaagaaaaagaatatgaagtccgaacataaaattaagtaggaggtactgaaggtggcctttacaagttagtatctctccatagtctggcacacaaagcttgtcatgccctggcctagactagccttatattctattgcctgtgaaacaacctgaaactgccaaagccataccaaaccatttctggccccccaggcatgctctgttgtctctcacctgcaagcctttgcgcatgcatgttcgtctgccaccgtgcccatctgtcacttctttagcagataatgcctgttcttcaagacgtcattttgggctcagccatattggaaagccttctgcagtccccacaggtgcctcagttctgtgctctcatattctgctgtagctgttttcacattgcattataactacttgttacctatctgtgtttcctactccatgacgacctgctacatgcaggaggggtgcttttgactccggattcccagtggctgatgttgggactgggctaggcagtttatgttgttcgccttctccaggctttagcttcgtggtgctaggtgtccagacccctttgccctctgctctttggcaaggtcagcccaatggaaagcattgaggaagattggagggtacaaagaagggcaaaccccacccctgcctcctctgcaactccagttgtagccaccacccctctgcacccctgcttctagtagacaatctccccttctgtttctagatcctaccagaagccactaggctctgggctccagtcacattttttttttctcattgtctctactctcctacaggtaatagtggctccatgttcttgccaatttgtaagttacatctttgcttggtttctaagcttttccatcatccatgttaccaagtgtctgtattaaattccaaatttcctctctctgaaagatctagagtggtttgtatttccctggctgagctctgaattataaaggcacagtagatggccagttgttatatgaaaaagacaataggaagagggacctttggcaatcatttgcaaggctcatttacatataaaacaactacgtgttttccattcctgtccatcttagcataaagcatggagccccagaaactggtactagtcctacagaccagacatgcagaaatagcagagcttaacaaaatgcatacagtacttattgaattaactccaattaatctgccttcttgtaactaggtgctaggtccagtaccttgctcttagtaggcattcacacaaacattgagtgaagaacagactgtacttgcaatccatcaccagtatatcccaggcaacaggcaatataataacacagaaagccttgatctataatctctgtgactttttggtacaattacaatggaagctttccccaggccttgcatagcttcgtgggcataaatcctgggagttcctcagaatgtctggggatgaggaaggagtgactgtgctccacaaacagcagagactccaggctggagtgcgtggtgtggtcgggggggccataaaaatgaataaaatctcccaactcagaggccaacaggccaaagaaaataggaaacagacaaccaagggccagcccctggacatgttagtgtgagcaggataaatcctcttaaaatgaattccaaatcttgctcagggcacacagcaagtatacaaattgaggaaagcatctgaggaaatgtggtgataaacacagggctgactgctgagtgtgaggccagagagagtgtgcagacacatttggcaggaggtttgggaagccataactatagcaagcaagacaagaaagagccttcgggtccagcttaggatggagaggcagggagtgcagtggttgagcacagaggcttctgtgccaatctgcctgggttgagattttggctctgttgtttcctagctaaggacaagtgagttaccctctcaggattcagctctctttcagggttaatagcagtgcctgccctcttggctcatgtgaaaacaacatgagtttgttcatgtgaagcagctggcatccgaaacctagtgagataatttataggcagtgctgatacactctcaggcacatttttggtttgtcaaagtctgcaatcaaattttgtattccattcattcatccattgctttaacagatatttcttgagtgcttaatgtgtgactggcacttggaatagaatgaagatctaaaacaagcaagtccctgattttgtgggccagaaaacaaaaatattgacgagtcagtgttaggttagtggtgagggagaatcaggcaacctgaagtggtttctaatgagactctgaagaatgaatgaatatgacaaatgtaccactctgatggaggatgttgtacaatgagcaaggctatgcatctgtgggagcagggtgtatatgagaaatctctgtatcttttactcagttttactgtgaacccaaaactgctctaaaagatagtcattagaaaaagagagagagaaggagtaggaggagatggagggaggggacttctttctgatgatcctaaatattattttggttactctacagaaaactaagggtattttaaccttggctaaatcatatttttgctaagttagatctaatttatatgagctgtgctcattttaaaaattgcagtacctcaaacttcattggagccaattatattcatctctaaaaggcactagtagttgatatcaccaccacacaaggaacttgttagaaaaagcagtgttcacctaaccaaggagtataaaaatgaagcttcagcctaaggaattttgtctgttgatttttcaaaggtatgcttgcttataatgggcagctgaactattcacaacagcaaagacatggaaccaacccaaatggccatcaatgatagactaaagcaaatgtggtacatatacaccatggaacactatgcaaccataaaaaggaatgagatcatgtactttgcagagacatggatgaagctagaagccatcatcctcagcaatctaacacaggaacagaaaaccaaacaccacatattctcactcataagtgggagcaatgagaacacagggacacagggaggggaacaacacatactgggacctgttgggaggaggggcaaggggaggaagagcatcaggacaaatagctaatgtgtgtggggcttaaaacctaggtgatgtgttgataggtgcagcaaaccaccatggcacacatttacctgtgtagcaaacctgcacgttctgcccatgtagcccagaacttaaaagtaaaataaattaaaaaataataataatggactgttgaatattagtctaggcattgaattcatttagtcttccagtatttattgggccacctaagagtggccatggactgatgctagagagataagtaaggcacagctccagcagtcaagaggcctatagttttggggccatgtgggcatgagaataggtaatgcagtggaatgcgcagtaccaaaggatcgcagttactaagaaagcaaagaattcattcactcatttgttctttcatttgttagttcactcaacaagtatttgtgttatatattatgtggaagacatgatatttatacattggggatatagccgtggaataagataaatatgccttgccctcttgagtctgtcatggttctacctgctatggttatagagaaattctgagttgggtcttaaagaatgaggacaagttatggagacagacaagttaaagggcatttcaaaagaaggaaattagcatttgggagtcccatgagtctcctgagtctcggtgtttttgtggaaaggacagtggcacttagcactggtgaccccatctcagcaccaggtggccccaccttggttctgtgcaaaagagatctacgatgggccatgactgggttttgtctataaaaaaatgactttatacccaggctccactgccctcaggcatctcatggatagtcacaggctgatgttttaggacacttgatttccctccttttaattaggtcctaccaggcttatcaaaaatatatccagatctatttttagagatctgaagtctctacgcttagcctttgatctcaatcctcatctaaggtacttaaatactgatttttaacaaggttgcttcactccagaaaatggcctacaaccaagttcagttgtcatggacatgaacattccttcagtatgcgaaccacaagtggatatgtggacaaatattaatgtattcacctaaatgtagtttgtaatataataacttgaagaataataaaatcagccaggcatggtggctcacatctgtaatcccagcactttggaaggttaaggtgggcggatcatttgaggtcaggagttcgagaccagcctggccaaaatggtgaaacgttgtctctactaaaaatataaaaattagccaagcgtcgtgtcacacacctgtaatcacagacactcaggaggctgaggcaggagaatcgcctgaacccaggaggcggaggttgcagtgagctgagattatgccactacactccagcctagatgacagagtgagtgagactctgtcttaaaaaaaaaaagaaaagaaaagaaagaaaaaaagaataaaagctaaaattccttgttaatatataattgtgtctttaggcattttcctttttgttttctaaggcatttcaagggctggaatttttttttaatattttttgtgaggctagttctctcttcttacctcgacatatgttacagataatatctgattccatttatttttctctgtataatgagaaaattaaaacaaccagattttctattcccaatcttctccacctcgtgctttctttatgaataagcaaaaaacaagtcaggaaactattattaggggattagtcccaagaatactttcccagatatcctcttctgcctgatccatgtcttcttgtggagaattaagcattaggagccatcctgttaaagatgatcctgcaccgtgaggtcgtgagaggccactgagtcaccacgctcttaatcaggaacagcctggtgttagtcatcagtatattttattatgttctagttctttcaaaattagttgttccctgttggcaaagtgactccagttcaaacagaagaggatggattctcggctaaattcccggatgcacattggggcataagcactgacaagtgaagtagtgcctctcagctaaaaactacaaactccgattagctactaaactaatgcccagtaggcttccacagcacggttttctgtctgaacaacttgattagcaattgagcattaaatattggtgagtcagagttagctgtgtgcttttaaaactcagatgagatggtatttttacttttgagaaatcattgttttccttatgggctcctaagagaagaaccaggcactgaacagaaagtcacaggcatggtggtttgtgccctgggctgtcatggagatactggtcttttgtaagctcagatagcaccatcaaggtgacatgcaataggattgggtgtttgggaattctagcaatgagtagaccaacctggatgactcctagtaaagaagaagagctttttaaaagagatgccaggctatgtcttgactgcaagagatcattacggggagcacaaaagataccaaagctgcaggttaggaacaaccattatatgtgcagtgtaaaaacaaaaaaccaaaacctgttagttcctcaccggagtcttctttaccagtgatttccagaacaaatactacatcaacacttttctttctggaagttataaactaagatgttaaaagtgattattttcaagtgctagcatcttgcttgttacatctaatttgttgacagtgaatatgcattatatttaaagtaaacaaatagttatttgcaattttaaaaaattgcaaggcctttccatgcctgctacctgtcaaattggccatttttcacttattgatgtttccttctaggctttgccaattcaacataatttctcagtaggtataattaaacagagatgctgttctgcatgctgctatttcaaagcattgttgtacacaaaaaaacagacagcaaagatcttctatgatgtaagccagggtaacccagaccccagtctaatgcaaccgtatcttgggcctcaatataggcgctctcacctttcaagtgatcttgtgataggacctgtttagataatgaggtgtcagagtatatgtttctttgttgtttgcctgtgaaaatgtatagtttgttaatagcactgtaaattataagaggtctgctccatggaaaagaaacatgaatagatttagatttttatggggctgaatcagccaaatcaaacacaggcttttctgaagcttccaagttttaatggaaactcacgctcttcagaatgttgctgcctaattacaattcatgccttttgcagacacattacagagtggaccaaaaggaaaatgttagacgtgttcacttgtgatttctattgtgttacttgtggagtgccagctgcataagtccagtggcctggtgcgtgcaaagacaaggaccagttcttggcaggctgtgtgacttcagtaggaaggagaaagagagactggcagaatagcaaatacagaccacacactcaaatacagaaccagacttcaacatgtgattctacatatactaccaatgtcagaatgtaatttaaaagtcccatggtactcataaccccaaacgaacccacttaattgtcttcatcagagaagcactttcgaactccagaaaaatggaactaccaagattttcttttaaaaagaactttaaacatttttaaaaattattttaaacaggtctaactggtatcaaaggagaaaaaggaaatccaggcgttggaacccaaggtccaagaggcccccctggaccagcaggtaaatcttccttcctaacaagagactgcaaatgtatatttttatattcacttggcattgcaagtgaggaaaatggtcatcttacatcctagtatgtaacttaaatggctgtatttcttacttgttttattgggaggcttctttgttaataaggatcctcccaatatacaagaccaaaaagttagagcatattctgggatcttattgtttgtgtgagttgcgataggacagactatgctatagtaacaaatacatcccaaatgcttagtggatttacacaataaagctttatttcacaatcacacaaagtttcatatgaataaggtagctctcttccatctcagaacccatgacctccatggtgaatcatgtagcctccaagagaaagaaaaagaaggcacatcgggctgggtgcggtggctcactcctgtaagcccagcgttttgggaagctgaggcaagaggatcacttgaggccaagagtttgagaccagcctgggcaatgtgacgaaaccccatttctaccaaaaaaaaaaaaatacaaaaatttaaccaggcgtggtggcatgtgcttgtagtcccagctacttgagaggctgaaacagaggatcacatgagctctggaggttgaggctacagtgaaccgtgatggtgccactgccctccagcctgggtgacagagggagaccctgtctcgaaaaaaaaaaaagaaggcacaccggtctcaacttcctaaacagaatgagatgtcacttccattcacattttattgtctggaactaatcacctagccccaactgaactgcaaggcagacacaaaatttagagaaatacagggctatttggtgagcactagtatttcctgccatggtaatcttactgaatgagttctgtaaaagttttgagttttgtgtattatatgcttttagaatggtctccagatgatcaggcttgatattagaattattataatttgcaatcttattataatatatatttataatgtcagtcttagccacattaagtaaagtgctttacagatttttctttccaatctagtaaggattttggaaaatactttttctgagagaggttcctaatgcaattcattttgagtgtaaatatttctgttattagagacaatgtgaggaactgatataacattacacattacacagaatgggtggttggtgagtgctgattgaggagctgaatatatgagagccaccacgctattcaaatagaaggtgatacttgttcctacttttcatttcagttctagttgagaaattccattatagttgaagaatgccttttcaacactgttggaacccggacctaaaaacaagcatacaagccaaaaaaaaaaaaaaaaacatgctgacaaatttcttcaattcacaacagttttaatcctcctatttttactcagtctgaattctcaattaatgtaaactagcttaaagaaattttggattagtatattgggtcgaatgtcaaacttgtcattggtcccctccaggacaatttcacactcatacaaatttactttaattatctagggccataaaccagtactgaattacatggctattctaactgttgatgaggttgagctttaattatctggggccataaactggtactgaattgcatggctattctaactagatgatgaggttgagctctgagtgtgttcatgtttgtgtctgtgtgtgtgcacgcccatagattggattcataaggaactgcattgggaaacaaaagctccaaaaagaaaataaggttgataatggaaggttcctttccctttaacatccaagaggaaatagaaaagatgcattttgcttgccagtttcctgagctgattgagagcattgacctccaggaggataagtgattacactatgaccctctgcctagggaatccagtctacaaaaaagaactcaatgagtagaaagaggttgtcctaattgtcctaaaagttgcttcttctaagagttagtttacttcttggttgtctcaaaactcaccctgttgtggcaaaagaccaacggttttcatctgtgggtacttcttaggaccttcaggggagagtcggcctggcagccctgggccccctggctctcctggaccaagaggcccaccaggtcatctgggggttcctggaccccaaggtccttctggccagcctggatattgtgacccctcatcatgttctgcctatggtgtgagaggtaagtgtcacaaaaagccccgcttgtgggctttgatcaatgttttagtatgcttagtaccaaaatgggaagatagtgctatgaaaaaagttaaattggttatgaatgggaagcagagcttgaatgcctcacttccttaaattatcccgagacattttctataaagtgcaaattgctatagaggctactcccttaaaaaccttaagagcaaattcaaaataacagcacatctaagtcttccttgcttcccagtgatgacctacatagacttggcctctgactttgtatttagcacatttggaggacatggttgaacattcttttggagtctccattcttatgtgacagctgtgatgtggccaagacgtcccataaaattttactcttggtttggggaaatgtcaaacttagaacttctcccgtaattaagagggctccttagattattttcaatgaaatcatgcataccacttgcatttaggtgcatttaagcaccacattttaggtgaccaagaatagttgtgagaggaaacaaaaatcatgctgtccttgtcttatcactagctactggactaaaagaatatgcttcctaaaacatctgcagtgtgcatgctggcgtgctgtgcaatggccccttttctgacatagtcactcttggaagcatcaagggagaggctgagggactgctgtggggccatgaacttactagttaatgggtttaaaattttctgcttcagtagaaatttaaccttagttatcacaggaattggtcaacaaagttttgctgatgtgtttttctctgttcatcttttccctccctgttctctcaaatactcctatccttattaagatctgatcccctacaatgattaccagcactgaagtggaaatcctccactctggttccattggccccagacatttagctgtggatacagaactgtcctgtcaaccaccaccaccaccaagcccctgcccctaacaatggacactctgcttccctgcttcttctgcatccctgccttcccactttcaaacctcttgcccactctgctccaaacatgatggagtgataacatcggaacttaaccaaatcatatatgtctattttaatagacactgactgctccatgtcagcctggatagaggtatatgatcgtgtgccaagaatttatcccagactcccctgtgtgacagcttcataataaagttacttaactgtgcctcttcctccttcctctccccacacaggatggatgggcatctttctccttgaccaccctactctcccttcctcccctgatcacctcccctccctgctcttccctggtgatggacttctaacatgagattttttaaaaaaatttctatttcttttataattttgctgagttttcagggtttcttctgtaaataaaacataatatttaaatggttggttatgattctagttttctaacaatttctgtaatgtatctttcccttcgtctatttactaactgtctgaaaccttatggggaaggtacaaggggcgtggtggattaagacatccactgctttttacccagcaggatatctctgtgtctctaaggacccaggtgaggggagaatatcaatttatgattcctgggtgcagcaagtccccacccccacttttcctctttagctccccatccagatcagccagagttcacccctgtccaagatgagctggaagccatggaactgtggggccctggagtctgatagcctcaggagaaatttgaagaccaactgcaagaactcttaaggaatcttgtttgagaaaatgttgttatgtggtttgtatgctacttttggggggcagggctcatttcagcagcctaaatctcctccttggataatgttaatattattattattattaacaaaaaatatatatttttaaaaagttcccttaatctatgacatggtagcaatgatttccctttggtgtcttaatggcatgtcagataatttgtttttccagagaagagagctcaaagaggaattgggaaaaataaattgaactctggaatcttctctctcaagtcctaaaatgaacaaacagatatgattgtgtttgagggaaatatgtccctagcaggaaaagaattcaaagaggttcaaagaatatgtcacttactcctacttgctgtaggaataaccttgctgataagaaaaaaagggacaatattggagaaactacctcttgtttaattgatctgtccaactctgagatcacttggtaactggtttcatgtgtatccaaaaatcagcatttggatttaagctttctgaatttggtagtttaagaaacagatttagtttttcagtggttttaactcatgtgaaataatgattttccaccagctctgatgcaaagagatataattttaatgaacgatttatccagcagtgtgttccaggggttgcctctccttatctacggggattactttgtacatgcagataagttttcgcaaacctatttccattttcttttgtaagcaaataaaactttaaaacaatg

SEQ ID NO: 154 - DNA, 8431 bp, Homo sapiens
aaaggtggctgggagcgccggacacctcagacggacggtggccagggatcaggcagcggctcaggcgaccctgagtgtgcccccaccccgccatggcccggctgctgcaggcgtcctgcctgctttccctgctcctggccggcttcgtctcgcagagccggggacaagagaagtcgaaggtgagtgagcctccgggccgggggccgggagaaaaaacctagcccctcggtgtccagcgctcagtgcaatgcaccccttttcccaggctccccgccagatgggcaatccccaggtgcgagagacctcctgaaccccttttgccgccccctccgccgccgggaccccgcccccgaccgtcgtcgtctcgtagttccatctgttggagagccgagacctggtgcttcaggcgggcagaatgactaagggaggaaggtctctctccccgagctcgcactttctccccactgccacctcgagggtcgccttgctacatctatgtcacctccgtgcctgagctgctccccttcagtagggcctaagagggagggcgtcacagaaaaaaatgcccagcgtctgggtgggctgtgcaagttcccagggagagagacaaggagaaaggagagaggcagctgggtggtcctggtcctgaagaactgctgtggggggctcttctaccccaagaatgatacaggcaggtagaaatggccacttggattcagggcattggtagaagaggcagagatctgtgctagaaagagctctggagtgacagtgcagaacactcaggaccctgagtccttacctgctcctggacccccgtttctccatctgcaggggagagtttgggggtgggagtgcatggggcacaatgaagctgagggcctcagaggggatgcttggagaagctgaaaaatccacaagctgttctctgaaatttcctcccctggggcagcctcactacccaggacccactgtcctcattagcctgaggaaacctggtagttggagaaagctggggactgctaattcagaagaagaggtagaattctctagagcctcagtctatttccagcaggtgtgtggcccacacctggagtggggatactgaggccaggagtgggatgacccagcatgcttatctcctttgacagtatgtactggggtgggctctgtagacctctcctctacccagggagtgggagtgggtggggaaggaggcagaagccaggtgtagggatagactcaaagcgagcgatttctgtctccaacttcccaacatgcataactcacatttttgcaagctctgagcttttgtttctaaaatcctctgggtcttcactttaattaagttcttatgagtctaggattccgtttccaaaattctgtccacttctcaggaagcccattggaagcacagggttccttccatgttactcaccccttttcggtcctcagcctaaatccgattaatcagcctctccttggagtcagtctaaatggatgtgaagccacttcgtccaagtcccctcctttttatccatccctgttcataatccccaactcagaaggcattttccaggtcaggaatgggatcgattttcaacattgaggtttggggtgggccatagacaggccagcaccgtggagtcagtcccaaccttcagttttggaaaggtcaaagaagatacaattgggccctgcctcaagaaggctagtggggagaacgtggactccatgaataactcatcatagctgtgtcttctctgcagcactctggggaaggataaatggactcagagagaataggatggggatggtctagaaaagttttagggtgaggtgtgatcatatcacatacaaccagtcaggacttgctggctaatgaaagcctgggcatgcccatctctgctcccaagttcttagagttcagatgtcttagctctgggttaggacccaaccactcaccttacccccaaccccagggtaaagagatagggttatggggcatgtggagaatggaatggacgaaaggtgactcagccccagagaggtgttttcctcctaccaattgaaagggagatgctagggaagagaccaggtcctcctcttcttgctgcgtcacctccccagtccaacttcaggctgcccacgctccttgtctctacaaaaggactgcagaagccggaaagagtgacaactgctgacgtgcacgggatcctagtaactgctggtttctaggtgactaaacctggcagagagaatcatggaaccacaggctgacagagttaaagggcccttaagacagccctgaacctgactccatcttacaatggaggagctggagccccagcaaagggggtcacatggcatcagagacacagcaaagcccagcactcaggtctcctgactcccagaccacttctcacagcatcatattgataggagtaataagacgggagaggagaaagacacaagaccagcagccccagccagccagagtcctggctgagtcccatcatccaactctcaagccattggaaccctcttctcttgcccggctgtgggaggattcaggcaccctcatggcctctccccttatctcctctggccactgtttcagatgcggtgctctgggattccacgtgcccagagaagggaagggggctcatagaggactgagttgcagtgatcagtggtgagcacagccgtggctctccacccatgggccaccttctgacccccactatcccttgacatgagatttcgttccaagagactccaggcctgttttgctctgccagcagattcccacaaccattttgggcagcagcatgcttatctccctggacatatgcccagacagtgtaagtgacttgctcagggccacacagccagcaaaaaatagaacctaatgaaatagggttctccttgccacacccccaagctgaaactgtgcccagaagctggtccttctgtttacaagttcccattattaggacaacctgtaatctttttttcctccatgtctcagagttcatttttggatcatggcagagttaaaaaagtggagaggctatagacatgcctggctttctggccactagatctttgtggcggtctagggtgtatttgttgtgccccagtttgtctgcattttaaggcggaactggccctggctgggaacgaggaggtccaggagcagtaggaatgttgatcttaggtcttgggcctgcctccagcacccaccaaaagtcaccggatgtggaatattagactcatgtaaagcaggaagtttgcaccagagccaagaagagagcttgcagctgccagggaatggcctggcggaggaagcgcagcctcgcccagctcagcagacctgcttcatgacagaggcagctcttctgcactctactggggccacgccctgccagcatatatcactcccttcacctggtcaggcccaggtaccttgcctcaacagcaagttctccagaattgaggggaagagagggagtgaatttgcttctctaactccagccacctgtctctgccctctcctggtctataatgctactttgcattccatttgtttattgtctgcccacctctcaaaggatatcagggccacaaaggaccttaaagaccaccttatacaatggtttcaaggtttctcctttcccatcacgaccagcccacctgccaaattgtgtcaatgatgcaatgacatcctttcaagaatagtctcagaattttgttgtctgtgtcacgggcagagtaggctcataggccacatcctactagccagcagtgaccccaatcccctctctcccactgatcatgatcctatcaagccatcatggttgacctggttggagagttggttcagttcaaggttctcattttataaatgaggaaactcaggtccgaagaaaagaaagggccagtccaagaccacacagggagttaatggcaaagggacatggagcccaggtctcccagcccacagtccactgcactctgtccctccttgtcctggaggctgactgtgagcagcagctggggagggaggaaggcataagggtcatcaccagcctgctcagacccggaacattaacacatgcaggtactgttgcttttccctacctcaccacagccctttcccccatgcctggctctcagtcctgcttccctatttggtaacaacagcttcatctttcctgtcctgcagattgggagcctctgaatcaccatgtccatacggcctcttcctcctttctgttcagtttttccttcacactggcctagttcaggttctcatcctcaattgcctggattattccaacagccacccaaccagtctccatcagcccgtctaggaacccagtcatcagctttagggcagtctccctgagagcccagtaaatgttctgaaattgacatgtgatgtggaagtaattagcaaaataagtcattctccagggttccatagcactcacttattaagtgcttaatattaataagtgcttattaggtgcttaatattaataagtgctttttaagcacttaatattaagtacccgaaaagcacttattaagtgctttcataatcattatcttaaacaaggaattaggagacgtcagtgctagtccagttccaattctcggtgattactttgagaaagtcactctctctgttgggatctttcattcttttgaaaacggagatgtccaagttcctttccagctctaactgctccttttatggcctgtgttccagatggactgccatggtggcataagtggcaccatttacgagtacggagccctcaccattgatggggaggagtacatccccttcaagcagtatgctggcaaatacgtcctctttgtcaacgtggccagctactgaggcctgacgggccagtacattggtaagagcccacccttcctccctgctttatttggggctgtatggcatatttcaatcacaggagcttttctggtgcatgggggaaagggtgatggcaatcacgagagtccaagccccttttctcagctccactgtgttccgtggttttgtgaagatgattatataagcctgaggtctgattgcctttggacatgttctaggagattcctagttatccttcttcatctctgggcacctcaacaaccctaaaggcagagggatagagattaggtttgtgcttagagctccctttggctggagcatgagatggtaactgaagctccatcttgctgagaatatcttattttccctcagccccatctgctttggtgcttctcttggcagctctctggaaagcaggcaattgcctcgaggccccagagtgtatgcgtggtgtagcgggatgaaggagcaggctacacttctaatgcccattctaaaataaactttgaagatgatctagtttagccttcccctcttctcaatctacacatgggaaaccaagactcagagcgaagatacaacttaaacagggtcacaaagctattagcggtggaatggggcatttggcgcaggtttcatgatctcctgatatgcttactcctttctccctagctggggtagaatacagaggctaggggaacaggcaaccaaaggcaagcgacagcacccaggggaaaacgctttggggctgagcagtctactggcagggggtcagggaggcaagggcaatttgaccctccatgctctgcctggcaatcacaggcgaattcccggaagtgaaaggacggcggtcacgtggcccagtggctgtgagtgctttttctgggatgcttctctctagccttggaacagagcagagtgcgtttgggcaagagatgggctgggtgctgctgcaaaagagaccaggggacactgaggaaactggggagctgggccagggcctcatctgtgttcctgatttgccaaagattatgggagggttgtaacctcaccccaaagaagttctctgccttgtatccagggatggatagttcttgctccagaaaactcaatcctgagggttctgaatgagtgctctagctggcccaggtggagggccttggcaatgggcaggtgactgacagctgacttgaggaagggtattattcttgtcctccaaacctccaatccatccagattagagtcaagaggataggacctgagtcccagcattgctgtgaactcactggtgatcctgcgcaagtccctccctttctcgggcctcagtagttccagcggcacagcgggtgagccgggggagtggtgtggatgagacagggctcctcgccaggatactcccacatctgctctttctctttggcccagaactgaatgcactacaggaagagcttgcaccattcggtctggtcattctgggctttccctgcaaccaatttggaaaacaggaaccaggagagaactcagagatccttcctaccctcaagtgagtactcactcagcatcctgagaaagctcctctcacatggcccacatcttgttatcaaccccaaatcatggtggacatttatcggccaccaagaactactctcctcttctaggatccccagtggaatgagggaagggaagggacaagagagggagaaggacagggacaactggttgtgatgtgcatccgcagggagcaccaaggttgagggacactgaaaagggaccaggctagaaaggaagaccgtggactcacattatgcctatgcccactgcacattcactggctcctgctgcccactgcagaataaatccagactcccaacaccctctcccctgttctgtcccttcctctcatttctgagccctgtgcccacctccttgggacccacctaagaacatttctcaacaggtatgtccgaccaggtggaggctttgtccctaatttccagctctttgagaaaggggatgtcaatggagagaaagagcagaaattctacactttcctaaaggtaagtgagctgccacctgtgctggctggggctgcagcccctcctggctccagcccacagcgtcagggcccatgccacctcccctgctcctgggctcttggggaatttcttggcacctgactattgttccaactagagggctctgcagaccctgactagggtctcattggcccattttacagaaaggcccagaaggacccagagtgaacatactaagggtctcacaatcttctagagccacagctggcgctggcagtcttctaactcccaaactggggctcttttctcagggccaggctattccccaggaaggcctgggaaggaagagggtcagggggcctcaagcaaggttgacactcctcttatccctgctctagaactcctgtcctcccacctcggagctcctgggtacatctgaccgcctcttctgggaacccatgaaggttcacgacatccgctggaactttgagaagttcctggtggggccagatggtatacccatcatgcgctggcaccaccggaccacggtcagcaacgtcaagatggacatcctgtcctacatgaggcggcaggcagccctgggggtcaagaggaagtaactgaaggccgtctcatcccatgtccaccatgtaggggagggactttgttcaggaagaaatccgtgtctccaaccacactatctacccatcacagacccctttcctatcactcaaggccccagcctggcacaaatggatgcatacagttctgtgtactgccaggcatgtgggtgtgggtgcatgtgggtgtttacacacatgcctacaggtatgcgtgattgtgtgtgtgtgcatgggtgtacagccacgtgtctacctatgtgtctttctgggaatgtgtaccatctgtgtgcctgcagctgtgtagtgctggacagtgacaaccctttctctccagttctccactccaatgataatagttcacttacacctaaacccaaaggaaaaaccagctctaggtccaattgttctgctctaactgatacctcaaccttggggccagcatctcccactgcctccaaatattagtaactatgactgacgtccccagaagtttctgggtctaccacactccccaaccccccactcctacttcctgaagggccctcccaaggctacatccccaccccacagttctccctgagagagatcaacctccctgagatcaaccaaggcagatgtgacagcaagggccacggaccccatggcaggggtggcgtcttcatgagggaggggcccaaagcccttgtgggcggacctcccctgagcctgtctgaggggccagcccttagtgcattcaggctaaggcccctgggcagggatgccacccctgctccttcggaggacgtgccctcacccctcactggtccactggcttgagactcaccccgtctgcccagtaaaagcctttctgcagcagctga

SEQ ID NO: 155 - DNA, 388774 bp, Homo sapiens
gaggagggaggcgcgcggcgccgcatggccgacgtggggctcgcgctctcgcggtctctcccgggcgggcgcgcaggcacgcgcactcgcgggtgcgcgcgcggacggccgggcggcggcggctcccggaggtggtggcttcactttccaggactcaggggcagccacagcgacagccgcgggcagcagcctcaggagccggagctggaacggccgggggcggcggcagcggcggcgctgagggtgagtccgggcgggcgcgagcgcggcggggacaggcgtggtcgggtgcgtggtgcgtgggtccggctttcggtgactagacggtccgcaggggacatcccgtccctggggcctccccagtctccctccccctcgcgcctgggcagctctctcccagggcttcggctcgagcctgcgacctgcacggacacccccccctcaggtattcgctcgggccgcgccggtgcctcccctcctcgggcgtcctccctctcgctgacgtcctcctcactcccccgacctcccctccgcgtcgcaggtctctgcttacaccgctcgtgccctagttccctccttcctcgctccccgtgcccggttccctacgccccctcccgcgagcctcctgcccccgtttctcgccctttctacccctcccccttcttcccatcccccccttctgcctcttctctccctgtcctccttctacccccttccgttctcagttccccatccttctcaaccctcccagcgctttccttctcctagccgcatcctggaactaagtcttttcaaaagtacaggataaatgtcacggtggaaagtgcccggcttgatcttttgctattttccctaattgcataattgctgcacatggtgtgtctcctggcgagtgccgggtttggctccttcgccgccgcaccccggtggcccgcccggagaagaccttgtggggtatatttgtgtgtgtcctggtgaggggtgtgtgttgtattggtcttttgtgatgcctggcgcttgtcacagtttggaaccgaagcccatttttctctggtctcttctctgcagcccccactggcctggtttgaaactggattccctctgtcctctcccccttcccgcccaccccacttctccccctcttttctccgatctctctcataatgttttgatctttttgccctttaccatttctaatgaagataaagcgtggcttcttgtggcttttttcccccacgaccaaccagaaatgtccaatccatcttcccttaaggaaattaaggctgctttagaaagacatcatcctgtgctcggtggctgttagacccatttgcatgttttcaagattcatcgttttgtattgtgtattcttgagagtctactaaaatatttttatttaaaagtacgaaaggaagtgctagggtttaccctcaaagtatctcgcggttctaaaggattttacgctcttcttagtttttaatccctgatttctttaaaaagtatgtttctagatatgtgataattcagtctggactttgtgaatctaaatatttgcctttactacggcaatttggatgctccttggctctttggaattctgtatgtgggctgacgctgaaatagagtgttttcatataatgccataccccattctctttcccctgcagcaccttttacccccaaatcaggtgttccactgttattttctgcataaatgtctttgcagttaaatttaaagctggatattgctgtgtgcatatactatatatttattttacattttagaaaagtttagaaacatgagtaggaagacagcaagacatatatgacagaattaaacgctttcctgttataaaagcttaaatgaacacttggttttgcagttttatactagtagatactgttataaggcttacctgggtagtaggctggatttatggaatgactatagttgcctttatgtagtcagtaatatttcaagccaaatcatttcatttttatggaacatgtgagtttcattcactgtatgttgctaatttccaggactgtaattacaacatagggtacatagctaatacaagcttagacagtttgtgttgaagaagtaacaatatgtaagcctcttaatatagttttaggaaggactacttattttatggttaaaaattaaattttactttgagttatgaagtaagcgtatttatctctctcaatatctttgaaagtatcattggagagtagctgtttgtttataaccctgggatttaagtttatcttccctgtagatgagataatcggatcagattagctatttaggaattaattttaaaatgctaatttagaagataatgtttaaaggattttaattcaggaatttttattcatttgtacttcagagagacaagacatcaagtttacacttacgactaattaaattgattcatagactactttttcttcataaaaattcgttgcacctgagtggtacaataatttttttctatactttttctgtaatcaagcattcaaaaaacaaacccaggagaaattccttttattattgatatttgaaaaagagatgtgaaaactttatttctaaaagttcctatagtggttatcaatggcctcagatggacttatcatttgtaggttaacatttggatgaaatatgtcttaactcaaaagtgggaataattcttttccttaatgtgaaaccagaaattacacctctgttggggaatttctaatagtatttttattagttctctggtgagactaatttttattttaatcttcctctaatattcggcagtagaaatttgagtttcagattatggctcagatcacatcattgagtaatctttttaagtaattatataactatggcattcgatagtatgtaaatgcacataaataagaatattgagaagaatgtgtggctttataactaatgttatacacaactgaaactctcagcatagtttattaaatcatagtttattacgctgaagctgcatcctcagtatagagaatattatttcattgaggtacccatatatttgtcatggaatggattgctcctgttttaaaatgtataaaatgatttctcactcatttcacatttcttaaggtattgctggcagcattttgctatatctgagcacctttccctgaggattgttctctttttcactctcatgcatgccgccctatctgatatgccattatgtacatacttacaagattttaaacttctgatatattttaactgaaagaaggtgaaaaaaaatattaaatccaagaatgagaatttagagtgaaataaaaatgaaaaaaagcaagaaatatgttacgacttttagagctagatgtgaaacatactgatataaaatttcagtgttctattaagtgactttagtgctcataaaagatgtcacagctgtggagactggtgctcttcatttacagaataggtagaaaagtagtcagcttttccgttagtatgtttcagagctgttggggcagatctgtttctgtttggcatggggagctgttggggttgaaggggtgctggtggtggtgtgtgtggtgtgtcagtgaaaggattcactattttctgttgactctttgtggctctgtgcttcctgatgcttccattcttttgcagtgctttttggtttgtcttacaaaaatttcagtccattaaagatcggtgttacaacattgctttggcttagagcaagctacaagttaaatctttagtgatgatgaattttcatcagtgtcaaatagctatccatttggactaagttatagtaattaaaaaattttgctttatttgaggtatctttacctgttcttattcttgatcatatcagaaacagttttatttcaagttgtaatttgattaagagtaatcaaaaggatccatttcaaaaggaatttgttcagtgtacctataatttttaaagatatattttttgctgttaatggtacttattaagtataggtattttgtttttaaaaaggtgtctgagaagatagctatacagtgctgaaagtgattattaggtgacaaaaccatggggagcacaaggccttttagagtctgggcatgagttttgttggttcagttctggatttgtcagaacactttaagctagtcagctcataagggatgtattcatagtcatcaaactcagaaattgattatgatagaatgacagttgaggagagatactccttttcacttactggaattgtttgtgtctgctgtctagattataacagctacctaaatatcaaggtattgaggaaattgagttggtaatcagaactgcttggggggcctgaactcagagcaaagggaatttgaaagccttgagggatattttagccagaatgtggggaaaaaaaaaaaaatcttcagtgtcttcatctcttgtgaaatatggttgctttagtatatagctgaatgctgtcatatggttcaatttttatttagaatcatgcagtcatgcaggcctctgtgttcttctgttatcacaaaggttacttaaaaccacttactagtttggagaattttaaccttagcccagccctgaggatgtattgattgaatagggatttgaaagtgtcgtcccatttttgtgttcccacaagtatttgtactaaccttcgtttttgtacttagcaagttggctagtcgaggtttttcacagttgtgggaccaaagggcttagcacagcgcctggtagagagtagacccttaatcatttttgtcttattttctgtaacagcattattgatatataattcacatactataaaatttaccctttaaaaatgtacaactctgtagttcttagaatatttattattagaattgtgcaagattataattatctaatttaagaacatttttatcaccgcacagggaagcatcatacccattagccgtcactcttcactactctcccctcactccctggcaaccacttacccattttatttttttattaattttttttttgagacagggtcttgctctgtcactcaggctggaatgcagtggtatcaatcatatttttattttttgtagagatcgagtcccactacgttgcccaggctggtgctccctgagcttcccaaaacattggggattacaggcgtgaggttcactactgaattttatgtttatggatttgcctgttcaggacatttcatataaatagtcaaacagtttgtggtcctttgtggctggcttctttcacttaccagaatgtttcaaggttcatccattttgtagcatgtagacacagtacttcattcttttttatggctaacagtacattatgtgaatatactactatattttgttcatccattcatttgttagtggatatttgagttgtttccagttttgattattatgaataatgttgctatgaacatttcatgtataaattttgtatgttttcattttagaatacattttgaatggatgaaggaaaagttttagcaactcccaaagctgcattgttttgtaaatgaccaatttaatccattttatattgagatttacttgttttactttgaggctcattctctgtgttctggaggtagcttactgtagtacagctaaataaatgatttttgattctttaatccaggatctaaaatgtccactgaggcacaaagagttgatgacagtccaagcactagtggaggaagttccgatggagatcaacgtgaaagtgttcagcaagaaccagaaagagaacaagttcagcccaagaaaaaggagggaaaaatatccagcaaaaccgctgctaaattgtcaactagtgctaaaaggtacttcagttattataacctttttattgttggtatcaatttatcatcttaagttctatttttctcttgcatttaatcattttttctgggatgtcggccgtgaacttcatggatttttcttttcccttcaagatgatctcgtttacatggttttaaccatagggaacttcagtatttaaagtcagttaaatggcaaggcaaattcataacatacatttccatagtgtgtttgtgtgtttatgtattatcagggaaacatatacagggtgtgtatgtaaaattgcagtagtttcatttatggttacttgaccataaatattttttttctgttcagtaacacagaatagagattaggaatctttgaagtagttactgagtgagtgacagtttattttccactactcccagttggtaaagtcagaaatgctgacattagcaacaggtgcatcttggtttcattacattagtcagtggatccatcttgatacggattttctctttctctagagaatagatggatctggaaagtaggtatttgaatgattttctgttggtactcaatctcttaaaatgattggcatgtcactggacttaaagggaatctgtttgatattgttacattatagaatatctcttggaaaataatttgaaagataaattaaatgtagtgtctttcctgatcctgtgattttatgttcttgctttgttttcatatattttacattgaccaagtcggaagtatacataaaagcgatctgtaacttgtaggcatagtggaatgcctgaatgttgtattacagctttatatgttattttatggtgtgggttaaggggaactcctttctcaaagataaaaaaccattattttgttctagtagaccttgttttcctttggcttagtcagtctacagggttggaaagaaccttctcaggacccttggtgagagatgttggagggatggtgagtggttattccaaggtactagagtattcagtttccctttcgtgggggtgtattgctgatctctgttgaaggagctgtttgaaagtcagagagccctgaactttaaactttgagacctgtatactagaccatgctagggtggggaagagggttcagtttgttttgccatcacaacacaattaccggggactcagctggctgacccttctgtttgccagaccacaacacaaatgacctgcttagaggtgacctggaaaatggggggtggggttaggatggatgagaaaggtggggaatagagaaaatatgacatttaggtgaaagaaggaagtcgatgtaggtgggaaggagatgttcaggtacagattgtagttccacgcagatgaggaagatctaattcagtcctcagtgtctgattgggtttttacagggcctcttcagtttgtcagaaaaggggaaggattggttggccaggtctgtggggaatagggttctgctgggcctgtgctttattctatgattgctagttagcaaagtcacctgttgtggtgaggctctgccttttcctctaactgggagcaccactataaaataccttaaaatcatatttcttgggtgatatgtcaaagaccaaattctgcttatgaaagatgtactgctttatgtgtgaacatgagtttttcaagtacgtgggtcatctttattttactacagtatatagagaaagtacggattattcaaacctaatgatagatttcacgagggaaaaatatagaagatatttttctgcactgtatgtaggagataaaacctagtttagagataatgtatgtgcagagcgcagcgcagtgcctgattggcagtaaatagaaagtggttgtattgcattggtgaaaataggaagtctcttttgagttgcttcctggctgaaagaatccctccattggcaaattgttgtgaatctgtgattttcaaattgtggttcatgatcttcctctagaaaggtcttcagttggttttcgggtgacagtgtatgaaatgatgtaattatgtactatttattttaaatataaaaatgcggcttcactactaattttttaatttaaaaaaccttattttcccctctctcttcctccaattcagctgatagtgaagttgttggttctttgccatttctgctgaacttaggaaaaaaattgggaattatgagcacagaggaccccacatcttttaagttcactgccatgtccacagtgcctagcagagtacagtcacagtatttatttactggctgccttggaaccctgagcttcttatagggatcggattttccatggatattaggatcttagtactagtgtgttcagaagattaaaagttagaggtagtttcaaaataaattttatttcacacttttttgttgacgatcatttttattcagatgagaagcctttcccaaatagtgtcattttatgagataaagagtagcattgaagagcttgaactctagagacagcatctacgtttgaatctaggttctagcatttagtagctatagctctgtggtctttttttttttttttttgaggcagagtcttgctctgtcacccaggctggagtgcagtggtatgatctccaactcctgggctcattcagtcctccagcctcagcctcccaagtagctgggattacagggttgtgtcaccacaccaggttaaatttttaatgtattttttgtagggatgggagtctcactatgttgctcaggctggtcttgaactcatggttgcaagcgatcctcctgccttggtctctcaaagtgttggaattacaggcatgaaccactgtgcctagcctctgtgatcttgatgtataatttaacagctcaaagcctcgatttcttctttcgtagaaggaagatgataacggtacgctgttcagaaggttcttgtgaggactaaatgtgataaagcatttatttggcacatagtaagctctcaaaactgatgccgtcactgatagactttatgtcagttaaaatctacggtcatatttttcaagtctgtttggtacaaactttggaaaaatgaggtatatgttaaccttggaggccttaatgctattgttaaactagaaatactcagatgccgtaattaaatacattttgtagtgacttaggaaaagtgcttgcacgtaggtgctcagttattatatgaaatgtactataattgtagaattaataattgtaatgcagtaattatagaattaataagctggtatagaactatgatttgaaaaatctcatttgtgatattatagaatagtggtatataatacagaaaacatttaagtgggtatttaaacagcagtagaaattaatttctgtctcagagttaggaggaaagattacagttacatcttagatgcatttttgcttttctttggcaagagtttcttaaaaaattgtcatgctcttatcacagcctgttctcttgatatgtctatatcactcttgttatatttgcaagtctgttgttggactatatctgcagtgacagatttagattattttgattaaattgactagtcagttcaataaaacgtctattttgagatcttctttgaatttattctgctgcttttacgggttgatacatctgtaaatgtgaattttatatcatatttattctaaattaactgtttagagtggacatggtgattttatttttggacattcaatatgatactgttcgaggtatggtttttggtttcagactaaatttttgttaggttgaaagattgattccactgtattccagtttgaacttttatcatatgggctcgtctaagtttgttttccacatgagaatgaaatagtacttttgtagataatcttttgtaattactgtattttcttcattctaaaagtacattttaaaactttttaatgtttctgaaattgggacacatcttaaaatttatgtgcacaattattgatggtgtgtcttaaaatcaatgatctttcagaatcatagatatatagtatataccaccatttagaatgaaactctagacttcttatttgcaatggcaatgtgttttctaaagattgctttgacatttaaaaaattttaataattagttgcatgatgcttttttgagaataagttcattttggaaggttttcgctaggtgattcaattgattagagtaggggtttttaggttgactgaggaatgtagtctgtaagggaatatagaaagttgtctagatgagatgaagggttttaaaaaaattcctgctaagaaattactttgcgaatctgcgtatccacacattcatgttctacttggctctcagtaaatttttgaattttctttaactcaagaaatgtatgtgtgtgttttaaacatgttagtacatatacactgcttcatttttctgaacccttagcccaatatattgatgttaaaatgagtgtttcgtatcttctctgttctgtataattttggtaccatattcttcatttaagtctgagtgaatcatgattgttatgattcccctcctctgctattttttttaaagcaaataacagtcccacacagcattcttattgtagtcttatcattcattcctggaacggttaaggtataaggtggagtaatatacattgaaatttaattgtgtattgctccttgacttgtctcaggaacaatgggcagttgctgacttctgtatcatactaacctaagaggtggcactgccttatgaaaattggaaatttaggtgattgttcaggtgatttttgtgtaaaataattttgtcttaaaagttctgatgagggaagtcttcttgtttgacttagcaagataatagttctccatctttcaccttaccagcgtaaaataattagccttagttttccttgccttttaaatggggactgataaaacagatacttagagaattctgtgagatttacctaatcacttttaacggtaaaagatcatcatgggaaaggtagactgtaagtgtgaattattgatacttttcatttttcctcaccctaagagacagtgcctgaaataggtacctttcttatcccacttgtcaaggctgagaaacttaatacataccataatcacaacttttgagatagaattgaattgctgtcattcaaaacagcaggacatcttacaaccgtttaaatagcaattcttagtataatcttttctgtcaagagacatacaaccattttaggtaacagtagctcaaaatataatattattgactcactgctcagacttcttgaattcatcagtaaattgctttttgtattgaataatatagacctagaattatagggatctggagttcaaattttatatagaattatatgacagaaaattatgatttatcagttttttttcccttagagacagggtcttactcttgcacaggctggagtatgtggtatgatcatagatcactgtggcctcaaattcctgggctcaagtgatcctcctgccttggcctcctgagtaactgggactataagcacacaccgctatgaccaacagtttcctgaattttttgtagaggagtctcactgtgttgtgcaggttggtctcgaatttctggcctcaagtgatcctcctgcgtctgcctcccaaagctcagggattacagccatagccaccaatactgagcctggcccaggatttatgagttttttttttgttttttttttaaacctaaagggcagtataaatataaagcaagatgtgttgtttgaaaattgcaaagaagtttttttatgttaaaaatagttttctttgacagtttaagcatgctttttagaatgcctattcttttggttctcttagtttaaaaacaatttttaaaagttgttcatgtttctgataacaaagtaaacagtacatagatttttttttaatggaaagtaacagtttttttatccaccccctgcccctagttctcccaattccattcccttgaagcagactgtttagctgtctttagtcttactccttctgttggttttctgtacaactcttaataatacacttatttctcattgaattgttaattgaagtaatatcttttgattccctgctctgaaatatgaggatttagtttgcttacctattcttcctttcttttccttcctcccagttaatgatagttaaaatttttttaaaaagattattggttgcctttatagtctaaaaatatatatttaaacttctgtttcttattcctatgaataacatgttttttattctctactttgtaaattggggataatatcttctccatccacttttagctggtttatattagctacacttaattttacatcttcaaagttaataacatttactttgtacagtgcaactaacaaccaatcttctatgctttgtctgtaagtaaaaggccaataaattatacatttattataactaaatattcaatgccagaccaaacagcatattacgattagattaactacaaggccagtgtcatgatctctgggcttctcaatgagtcatagcattgaggcacaatagatcaaatctttctctccccacctcacccccaatgtctgatacttaattaaagttattttacattttagtttgcttcatatttcatctgtgattttcttatgcagctttttttccttctgggatttctgattacttccccctatgcccctttagtagtctgttttattggtatacactctgcagccccctcttgcctgtctcaacctgtttgatttacacccatttgttttgtctcgcagaaatatattgaaatttctcactcattggtgaccaccacccttctctttgctgtttattcctttttgcattttctgtatgtcccctacccacccagtggggtcctgaatgagtgagaggtgaaagtgtgtgtgcctagttggccatctttaacctggacttagccactgagttttgaagtgtctgttgtatacttttgtgtgaaatccataaaatatcttctcctatatcaaatctttgagacttctgtcatttaaatatgggcaatatgtactttgtatgcatataaatacttcacagaatccatattagaaggaagttacagtgtgttaaaagagatcacggagtttgttctagttaacttctattttacaggacggaaaactgaggcacagggagagagagcaagcatgtgtgagcagtattcttgctcagggactcaatttaatggcctagcagaattacaatgacatttttttgactttgaatttcttagccgtgctctgattcataatgcctcgccaaccttgaatcacgtggtttagagaagtcacaattatattagtagcatgcagttccttcgggaagttgataccaattctattggagggatcccatttattctagtagtttgttgtcttgaaaaagaagtagaatgaaattgtttgagtttaaatatttttgctcaaattcttgttttggtttttaaagatactttaatcagttattattgatatactgtcacagtaattaccagacaacaggcatccagctattaataaccccatatttaagaaccaaggcaaaggagaagaaacggttttgagaattttttggtatttgatttaacaaagcctacatttaataaggtatgaatgatagttaagggattgccaagtatagtcttagaaaacagtggcgcactttcagcctttttgtatgtacataggatgttagatgctgttaaaaataaaagtagaatgtaacacatgaggatagagcaggcttaaatttttttttttgcatgaagctcatgcaatgacattaattgctcatgtaatattagggtagttctagccgatgaaatagtgttaaacttcaaagtcccaacctggtccaaattagaggctccaggaaggaataccatatgcatcttgatggcagtttcaggtgttggaatgagatcccgaatcatttgattctatcagtcatgatgcttggatttaacttaatatcagctttccatcctgtatgggaatgctctaatacaaaacagaagttaaaatgacccatgaatggtgtggcagaaatttccagctttagaaattttaattagtgctgtcagtggttcagtgaagtcgtagtgttccttccacaggttgcatgcactggtagtctcatcctttagatgcatcctcaaaaccctggcagaaattgcaactttattgtttgttggatgtgattctttatacagtattagtatttcaaactaatataccaaagggaaatgttattaaaatgtaacgttttaatgaaataaattgttaagagtgaagatatttttaacataatgttctttgtctttattttaaagaattcagaaggaacttgcagaaatcacattggaccctcctcccaactgtaggtaagtactcatggttttttatttacttgtatcttttgcagaaggtgcatttgaactgttggttttatatgcagctgttgttgtagtctgattaattagtaaaaacatcattgttgtttgaacttaagtgactgtggaagacaatggtttttgtcatctctgtgcagaaatggaatgttcagcaagtatgtttgtagtggttgaacggagttgccaaaagtagtgtaatgcaataacagtaagacaatgaaattatagggtaacaaatacactatgacattttagtggaagaggtgttagggccttaagtggtttttttaatgatagaataatagcatggctaaaatatgtgctatgttgtattgttatcttgttggaatttgatttttaaaaatgcagacacattaaacagtgtttcttcatggtttacattatttcttgtcgtcattggttgtgactaggtaagaatgggtgatttgaggcaatgatgttaaatgtaaaactctctctccctttatgatcatgacctcgaattttctggtcagtgtttacttttaggaaagaaaagtgcttacctggaaatggttaatgttataaagatacatggacaaagaggagaaaaataacctcttaccttatgctgctgctttgggtctggtgcagtagttagaagatggctgtttggttatttttaagacacttatttctgttttgagatgagatcagcattggaaccaggccaacctggagtttttctggtttaaaatgataatcttatgcattgaaggtgagagggccgattaaataaaaattttcccaacgttgaacgcaggtagaatttattgcttggtatgatttctgagtttactgatcttacttttatgtaaaaacaaagataacaattttgtgtaggaaaaattctaataggacttactttgtggtgaatctaatatggttcttcaaatgaatcatgtacagtttataaacttacagtaataatattcaaagaatgtttcactcaaatagaacaaatatttctttgttaggtaaaaccgtttaacctaagactttttgtcactcttaggactgtattacatcaaagccgtttcagatggcagatcattgtttagcttttggtggtcaatgattataagtggatggatttgtggaaaaaccccagtttgaattaaacctaacatcctttgtttcttaggataatatttgttttaatggtctgaatctttaaaaaacccatattattaatatattacatatattatttttgtaaccttttttatgaacaattgaactgataaataagtgaactttatacacttctttgcttaaattttgacaaccccaatcaccggcaaaataaacaactttgttttaataagtttgtttaaggctcatttttaataaatgaaatccacatacagtatcatgtgatgtagactgcaattttgctattagataaatggggaaaggaactatataaaggttattatttaaataaacaaataattgaaccatagttctattaaaagtaaaagaaacgtttaactatagtgtcatctgaaatttggaggtttactttgtctttgagccttagtgacatcattactagttcatatgtaagctcttcataaatagagcaaaatgtgtattacaggttttaatttttaaatgtagaagtcacacataataagcccttcaaacagtttcagggaagatatctactttagttaattttctgacttgggaatttgtaaggaaattctcacttgtgggctgaggattggatagctgataagtttgctttagaagctaggtctgcagtgcagtggctttggctccttttattgattctaaaacagttgcttggactgggtcaggcagagagaaaggttatttaccttcgtatggcactccctttggcaagcaaagggtcctctgtgctgtagctgatagaaaatgtaaaactggttaatcaacacttatcagtgtgcttgtgttacttaatatggatgtttggtgtgcttattaagtgcatcactgtggtctttggactgtttggtgtcaaatatttggttgtggtttgtagttaatctgcccatctgtatttcggtgaaaatgtggttaccatcttcagaaagagattagattgcagtgttagtttggcttatttttggtcaaagttaacagtgcttttgtggttgatttttacaagttctgcactgcctgcattggcctaatgactgtaatggattaatttatcaaaatagagcaaattaaagttatctgcctaatagaagtcagagtcctttacttaatcagttaagtcatatctcatttcagaagaaagcatccccttactctgctccctttgtggattacctctcctatcacacatgcctctcaaaaccctgccttttggttccctgggtagttgttagtctgctatcacatgtaaagattatatgtgagggaacatctgtgggttttacctgtttagtcagagagtggagaacgattttttctactggttgtctgggtaggggtgggtgtgtgtcacattccactttgagtgtggtttatcctattttcgggaaccttaacagacaacccaatactgtgtgtttgtcaggttagatggaacctctgaattttggtgcatctcttaggtgatatctagttaagcttcttttggaatcatattgaaggaactgtatgtgtttaagcgttgtgcaaatctgttatttaaagaagttgagactatcaagtcaccccgaatcacagcattcagtgtagataaagttttatgtaaggcatttttagaggaagttattctaatatagtattggttaattttttttcaggttttgaataaacaaatattattttaaagaacacctacaaatgatttaatagattgaattatttcatgtaggagatatttgcctctacatatttcagttttttctcactttattgttgtctttgaagtaaaaatgcagtaagatagttttatttttgaagttgggttaaatatgtcatcctttttaaaaacattactcacagtttaatgggtaaatattttaaaacaaaactttatagctaagaaaaaatttctgctcataaaatcgtagcgtctgtagggccataggcatagaaaattacacttcatttgagtgaaatttggtatatgcttagagtatttcctataagtagtggaatatatttttcttggccttaactgtcatgttggctaacataactgacccatgacatttgcaagggttctatcctgaggccttcacagatccactgatcaataaatgttttcatactactgctgagttagaggtgctgggcagttggttagaattgctcgttaccttggtgccttgcacaccagcttagatggatagagtgggtcaaattgatgctttatccttacagacctctaacaggtagattcactgccccttataaatgactacaggttgtaactttcacagttcttcacaaattgttaaaagcaagatcttagatctgtgcatgtcagtgtgttcatttatacttcctcggtgctagtggagaactggcagctagtgggccagcaaatctccagataaaaattaaaattaaaatcgtcatcatccaaaggataacttgctcctctgtatcacagagaagctaacttgttcaaatgctattatgatctgctactgctaaagtttgtattaggtttacgagcaggggaatgacagagaatccttattactttttggaagaaaagactaaggtaaaatgatttatttggattttgatttttggtctagtaattgaacaagtaaaaggaggaagtaaaccaaaaaagaggatgtagttatactagcagtttacacttctatttctatgtgtttcaagaatctgctcatggaacactggcgctgctttttaattttgtcttttatttgataacagctttattgagatataaagtgtaaaattcacttatacttttaggtttttagtatagtctcggagttttgtaatcatcacagtctgttttgcaatattttgatacctcccaaaaaataatccatgccttttagcagtcactccttccccattttcccccagctctttcaccaccagccctcggcagcaattagtctactttctgtttctatagatttgccttatctggacattttgtataaatgaaatcttgtgtgctttttgtgtctggcttttaaaattttttttacaaagtgtaatattttcaaggttcatccatgttgctgcatgcgttagtacttcttttttttttctgagacggagtttcgctcttgtcgcccaaactagagtgcaatggcgtgatcttggctccctgcaagctccacctcctggattcaagcgattctcctgggtcagcttcccgagtagctggaattacaggcgtgcgccaccatgcctggctaatttttgtatttttagtagagacggggtttcaccgtgttggccaggctggtcttgaacttgattacccaagtatttcttttttaaaaatatttttaattgaggtaaaatatacatacatgatttaccatctttaccatttttagtgtaaagttcagtgaatatacatttatatatttatattctttttttcctcttgatccccccactccccttcctggcctctggtaactaccagtctactctctatttttgagatctacatttttagctctcatgtaagagtgagaacatgtgacatttgtcattctctgctgggcttatttcacttaaccttgcctgtggttccatccatgttgctgcacatgacaggatttcattcttttttatggttgaattaaatattccattgtgtgtatataccacattttctttattcattcatttgttaatgggcactcaggttggttccatattttagctattgtgaatggtacttgggtaaacatggaggtgcagatatctctttgatacattaatctcctttctttttgatatatactgatatgctttggcaatgtccccacccaaatctcatcttgaattgtagctcccataattcccacgtgttgtgggagggactggcgggagataattgaatcatgggggtggtatcccccatactgttcttgtggtaatgaataagtctcacgagatctgatggttttataaggggaaaccccttttacttggctctcattcttctcttgtctgccaccatgtgatgcgtacctttcaccttcaccataattgtgaggcctctcaagccaggtggaaccatgagtccattaaacgtctttttgtaaattgcccagtctcaggtatgtctttatgggcagcgtgaaaatggactaatatataaatatatatacccagtataggaattgctggatcatatggaagttctgtttttagttttgtaagtaacctttgtactgttctccatagtggctgtactaatttacatcccaacaacagtgtacgagccttcccctttctccgcatccttgccagcatccgctattgccgtctgtttgatctaagcctttttaacctcagtgagatattgcattgtagcaatgttgagcattttttaatgtaccctttggccatttgcatgtcttcttttgagaaatgtctgtttacatcttttgccccccccccctttttttttttttttgagttgtctctctctgtcactcaggctggagtgcagtggcgtgatctctgctcactgtaacctctgcctcctgggttcaagtgattctcctgcttcagcctcctgagtagctgagactacaggtacatgccaccatgctcagctgatttttgtattttttttttttttttgagatggagactcactgtgtcacccaggctggagtgcagtggcatgatcttggctcactgcaaccactgcctcccaggttcaagtgattcttctgcctcagcctcctgaataactgggattagaggcatgcaccaccacacttggctaatttttgtattttgagtagagatggggttttaccgtgttggccgggctggtctcaaactcctgacctcaagtgatcctcctgccttggcctcccaaagtgctagtattacaggcgtgagctgcgcttggcccttttgcctgttttaaattggattatatatatatatttgctgtcaagttgtttgaactctttacatattctggttactaatcccttgtcccttgtcagatagatagtttgcaaatattttctcccattctgtgtgttgtctcttcactttgttgattgtttcctttgctgtgcagaagctttttaggttgatgtaatcccagttgtatatttttgctttggttgcctgtgcttttgagatcttacacaagaaatctttgcccagaccattgtgctgtagtgtttcaggtcttagattcaagtctttaatccattttggtttgattttttttgtgtatggtgagagataggggtttagtttcattcttcatatatagttatccagttttcccagcaccatttattgaaaagactctccttttcccattgcgtgttattgatgcctttgtcaaagataaggtggctgtaaatgcgtggatttatacctgagttctctcatctgtttcactgatccatgtgtctgtttttatgccagtaccatgctgttttgattactatagctttgtaataaattttgaagtcaggtagtgtgatgcctccagcttcattctttttgctcaggattgctttggctattcatagtcttgtggttccatgtaaattttaggttttttttttttttttttttttttactatttctgtgaagaatgttattggtattttgataaggattgtattgaatctgtaaattgctttgggtagtcttgtcatttaaaaatattgttatagttcttctaatccatgaacatagaatacctttccatttttttggtgtcctatttatttcatcagttttatagttttctttgtatgagtctttcacttcttttgttagattgattcctaggcattttataatttttgtagctattgtaaataggattgctttcttgatttttttcaggttatttgctgttgacatatataaatgccactgatttttgtgtgttgattttgcattctacaactttgctgaatttcttgacagttctaacagctttttttttttggtagagtctttaggttttaacatcacgtaatctgggaacaaggctgatttgactttttcctttacagtttggatgccctttatttcttttctcttgcctaattgctctggcctttgttcctacttgttaccaaataaacttccatttttatggatataccacattttatttttcttctcatcaattgatggatatttatattgtttccacttttttgctactatgaataatgctgttatgaacatttatgtacaggtttttgggtagacatttgttttcatttctcttagatatgtacctagcagtggaattgctgggttatatagtaagtctgtgtttcctgccagcagtgtatgagggcccagtttttctccacaactttggcagcacttgatgttgtcctttttttttttttaatgatagctatcctagtagatatgaagtggtattttgttgtggtattgatttgcattattctgatggatgatggatgagcatcttttcatgtgcttattgtccatttgtttatcttctttggagaaatgttagttcaaatcctgctccattttttaatgacttgtcgttttattgttgaattgtaagagttttttcaaaatacattttggatataagtcctgtacatcagatatataatttgcaactatcttcctccattctgtggatttttttttttttactttcttgataatgacctttgaaacatagaagtttttgctttttgtgaagtctaaatatctgttttttcttttgttgtttgtgcatttggtgtcatatcttagaaaccattgcctaatccaagaccacgaagatttacatctgtattttttcctaagaattttacagttttagcttttacattttggtttctgatcctttttcagttaatttttgtatgtggtatgagattagagtccaatttcattccttttggcttgtgtagacccagtgtcccagcaccattcgttgaaaagactattttttacactgaattgtcttgatacccttgttggaaatcagtggatcataaatgtgaagatttattgctgaattctcaatttggttccattggtctgtatgtctgttcttatgtcagtaacatactgtctttattactatagttttactgagttttaaatcagaaagtgtaagtattctaactggtttacttttttcattgtcttaactcattaggtaaggcattcccagtggaaatgggaagaggctgtgactggacataaacctaactactgtgtcattttactactcatgggagccattttatagaagaaagtgttttttttttttgtttttgtttttgagacagagtcttgctctgttgcccagactggagtgcagtggcaccataccagcccactgcaacctccgcctcccaggttcaagcaattctcttgcctgagccttctgagtagctggaactacaggcgcatgccaccatgcatggctaatgtttgtacttttagtagagacgggtttcaccatgttggccagactggtctcgaactcctgatcccaagtgatctgccctccttggcctcctaaagtgctgggtttacaggtgtgagccactgcgcctggccgaaaagtgtattttccacatcatagtaactaaaatggtatgtagggaaagtgtgtgtgggggttattttttgaaattatagaataggaaggtattgagacagaaattagaaacaatgtctgtatgcgtgatctctacaaagaacaaccaatgcaaaatctaattattgtcactaattatttttcttctctgcttattgtaatatttgtacagcagtttttaacttttgaaggatttctgtatgtgatgtcatttagtcttttcaaccactttctgaaactcctaacattaagtaacttgttcaaggttgcctgagcctcccaaagtgttggaattacaggtgtgagccactgcgcccggccaggaaaacatctttaaggagggatgtgaacttggctttgaagaatgggtgggatttggaaaggtaaaaggaaatagggatggctttacgtaagagaatgaatgagagcagaaacataaaaggggagaatttagtatagttattcttgggacagtgagtttaacaggttggccctccttcccatgtgggaggtaagatttgttaggactttctaggaagggtgttaaaattaccagttgctgtagtttgaggtttaaatactgagtaaaagagagtgaaattgaagttttgatttaaaaaaattgtgtcatagaaattaatttgtaatatggagtggagaaagatataaagagtttgggaatccagtaagaaaagtgttgcatgaatacaggttcaagttatataagacctggtgatgtgataccatgaagaccaaaaaaaaaaaaaaaaaggcagtggaaatgggagacgtttttgaactggcccaccttgttgatggtgtggttttgagagacaaaattaatgatgtcgaggatgactttaaagagtgtgatatttgtagactagaatggtgatactattggcagaagtggatttgtctctatggcctctacggatcttaaaattgataatacatccctctttatttagtttggctgcctggaaactcatagccttatttgctcctcagttttagtaattaattgcattttgtgtagaaacctcaactctctggttgtatttgatttttctacccttttccctcttttatatccatatcttcatttgtactttcatactacatatatttttgtcagccagctcagagtcttttcgagggaggcatattattggtaaacgtacaatgtgaataactgaaagtttatgtgaatgtgtattggttagcaaaatgctggcatagtttttaagaggagttattaacatgataaaatttaaatatacattgaggacctatgttatttatttagggtactgaattatttgtatccatctctttttcctttatctaaaacaggtaattgaggaatatttttaattcaatcctgtgagttcttgactcagttgctacagtgttgagtggttttggatagactttttgaagacaaaaaactttaaataacattggaaatgcgtgtactaagtgactagaacagttaacaagaatggaatagcacctgcaggtgggatagctgcagagttgggctatgtgtactgtgtgagagggagtgagggagcatggtcttgccttatgttccattggcagttcagaatttcaagagtttcaagcttgtttatattctcatttctgtacttccttttataatttttaagatgagctccttcattactgccaagagtatgttttctttttgcctttaccttgaggctgtcttttcacctgaggtacaaccaatatagggctttaaaaggctggctgcttgttatttcaaatggggaactttatgtataatagtttgctgtcatgtacctgtacttcaaaactgtattaagggaagacaactgtctcaataaaatcaccatgagaaaaattctttgctttgttatttcaaaatgttattgttttaagtctgcctttaatcatagctttaaaaatatttatttgctaataaaagaaaatgttgaatggtaaagtgagtttagtgcccattatttctggtctttgaattttttttaaattctttactgctttaaaaacgataaaataatgtgtctgaaaaatatatattaaatggtcacactgggactgtattttataatagcaacagaacattttattattgagtttgcccagctttatatctagttattatttcagatttattaactaagcactttagagataggaagtgtcatattactctccaacatgtaatattttaattcccataccccttttatcttttaagatatcctgaaactgtattctttcatgtatccaaatttctttacggtgattattatgctcgttgatttacaattaatcaactaagctttattgcaaacaaataaaattttttagtatattttaagacagtgtaaaatttgatttttgcatttttgttgtcagtttgctttttgggctatgtttctaaataaatgttcatttagaactgtctacattcttcagaatgtctacatactttagggacctaatgagatgcctttaagggtatatctcaatccgtatttgtgtagaggcagcactttcttctaaaacgtttaatagaatcaggcaaagccataagctaaaattcattttctacttcaatacacagcaggtagactctctccacacactttcgcctatttggaagatgaggcctagtaataatttgaaatgaccaaaggagaggcagaactcttacaccagagccaagatttctgcctgagtatcgaccatttttcctccaccttgaatccagcatccccctcccaacattccgctaccatcacttctcctgatgcttcagattacaactcttttacccgtttcacccagtctggcaagagctctttctttaatccctgcatttcaggtagcattcagttcagtatatctgtgaattagtaaatataattaattatagtagggagctaacagctattgaatgtttccagtatttgaagcagtgtgctaaatgctttaccagcattatctcgtgtaatctttacaactgtctttgaggtgacagtagttttattatttattttaagttttttatttccataggttttttggggaacaggtggtatttggttacatgagtaaattcttcagtggtgatttgtgagattttggtgcacccatctcctgaacagtatacactgaacccagtttgaagtcttttatccctcaccctcttcccaccctttccccctgagtccccaaagtctgttgtgtcattcttatgcttttgagttgaggtgggtagtagttttgtacagcattttatagatgggaagacaggcttggaagggttaagtaactaacttgctgaaggtcacatagcaagtaaatggcagaactaggatttcaaccttgtttctgacttcagagctcaagtgttttgaggtcttgcttttctgtttccatttgcaaaacagatttaggtgaactgctctagaacagcactgtcccagtaggactttctgttatgatagacctgttccttatctgccctgtccagtacagtggccactagccatatgtggacatcgagtatttgaaaggtgactagtgcaactaaataactgatttttaattttaatttagataccaatatgtgacttgaggctactatattggacagcatagatctagaaaaatagctttttaaggttaaacttataagtatatgcttaaacttatgtttatattgggtaagagtaaactacgaggtcattttgatggtgcttgtagttaggtatttatgttgtgtatgtgtataaatacatatatacataactacatactacgtaactacttgtagtatatatttatttatctcccctctgctatccaccattatattctaaggactcttaaatattgtgggagacaatttaagtaaaatacctttgtcagttctattaattggttagatatttattttaaatttcttatcaaaatgaaagcaatattgcaaatgattgtttttaatacagactgtgaggctactgaaactggaaagtttatggttcagcagtgtctgcagcccagagagagaaataggacttcctcaaggatgtggagtttaaaagcaaaaccaggactagtattcagtcccgatagttcaatgtgttgcttatttcactgatagaatgtggatgcattttataaacttagagaatttagaaaactcataaataaggaaaattgggagttcttatccatgatcatgaggtacattggagaagagttggctgggcgcaggggctcatgcctataatcccagcactttgggaggccgaggcgggtggatcatttgaggtcagcagtttgagaccagcctgacgaacatggtgaaaccccgtctctactaaaaatacaaaaaattagcccggcttggtggtgggtacttgtaatcccagctactcaggaggctgaggcaggagaatcacttgaacctgggaggcagaggttgcagtgagctgagattgcaccattgcaccctagcctgggcagcaagagcgaaactccttctcaaaaagaaaaaaaaaaaaaaaaagagttggatttatttttcctggagaggtgaagggtcatgacagcagtgatgaactgttttcagagccttaacattctttattaagcttattctgtgtgattttggggagtagaactagcgctgctctgttaaagttagagggaaaccactttttttgcttgataaaagccttcatcttcagccagggctttctagagaaataatgggagacatcagtacataatgagagctctacctttagaggaactgaaaatgaatttatttgcttatttcagagagattttcagttattagatgggtgatggtagtactagaattatatttcccagattctggaccctaaacaaatgaagcagatttttatcagcttttgtcctcttcacccatagattgtgactcatttttcctctctttgccctcttgaaaccagtggtaggtaatttatatacttcattggcccacttaaagcagcttgtatacttgctatcagttccacatcttagttggttagtgaggcttttatttccttctttcctcaaaacttagatttgtaggaagaggaggctataggaagaacatgaataaatgagtctggtttgaggatagggattgtgtgtggggtagaaaacaacacaaactcaggacgcttttaaaatttttcttattaaacaatagtcaacacaagacttctgtagccagatgtttgggggtttctcttcatacaccaagcaagcaatcagttcttgaaatcatcaagcaattgaatcagtgtccacaaattcaattctgacactctctacctggaggtagactcagaaactacagattgagggcttagtcccaaaagattgtatccttcttcctaccagtcacaagtccaggcctcttggaacgtctgactgacttgcttcaaattagggttcttgcaaaccccatctttgggtttgtttgattaactagagtgctcacagaactcagggaaccatgtttgccggtatattacaaaggatattttaaaaggatacaagtaaacagccagatgaaaagatatataggttgaggtctggaaggatcctgagcacaggagcttctctacccatggaagtggagtatgctaccctcctggcacctggatgagttcttgttcacctttacgtcagcctccatgtgttcagctgtctggaagccctgctgaccctgtccttattggacctcttatggagaccttattacttaggcatgattgattaaatcgttggccagtggctatgatcttaagcttcagtcccctctccaccctggaagttgaagggtaaggttaaaccctctaatcatgctttggtctttcttctggcaaccagcctctatcctgaagctgcctaagggctgccagccagccatcagtcttggcataccaaaagacatcactttgtacattccaaggattttaggagttgtatgccaggaaaacggggttgaagaacaaatactatttcaaaatatccatcactttgctaggtctcagattattgcatgttgtttcataaataccttttacctgacgtagtcaagaaataaaaatattactgttaatcaaatgttaacatacattgagttcatcatctaatggaaatcttttgattattcatttgtttagtatataccccttcaaatttatcaaactgtgtaacaaactgtttagaatcctcctgatttccccctctttcttttggtcctggaaaaaataatacttgcatcctcaaaaattgaataaatgttagtgaagaaaagttatggtttatttgggatgtgttttccttcctacatataaatgttgcatgagccgagaaatcttaggattaaaagagaagtaaaagtttttaaaagattttaaatgatagaatacactgaagaaatcatttttgctctttgcgcatacattgtttcatttataatcgattaagagacaattatttaaaaacttcgtccaatcctacgaaaagatgaccatcatgtgtataggcaaaggcactattctgtggcacagtttattagagtagaatgatttgagaccaacatgcaagtggtgaactggaagaaggtgacagattcagctgcaagtgctgaagggaaatctttgcctgaaggtagggcagtttcctaagagtggcacagcccattgctttaagcatgaacattttggtgtcaggctcaagttagcaggcgaatgtagccctgcatttgcagtctttggattctaggtggctggttagttggtgagtaagggagactgtaggggtgcagtggagtgagggagttggcaatagcctgagcctgtaggggaaaagtgagatggtttagaaaatgtgagaaagtaggactgtaagagtttgagaatcaggctcccttgactaaggtggggcaggattggacaggaatagtatcagtctttttagtttaaggtaaaatatttgcattcttatcaaagctgttgtacatcacttcagtaaatgctctgtaatagcacggttcataaatgatattaaacagtgttatggtcctactttgcaaacccctgagatctgaagtgggtggaatagaatagataaatttgcattttaagagggggtgaacaaaggaattcagtttactgttttgttgcattaatgtaaaaccctttggaaatttttagagtttatataatagacactttgttttttggatgatatcctaaacattggaacaaaaccttatgcattttactctaaatttggttataaggcacttctgggactacccacatggcttggatgatctccaagtggctttagttattaatattataataacaaaagaacctcattataagttttgcctaaaaggtaaaatggaccccaaagagaacattagaagtagcctccaatatttaagtagcagacttactcagttcttgattatctgcattaatgggaaattaatagtttactatgtagtataaggtgaaaatatgtagtatttaaaaaactacatattcatgggatatgaatcacagatggtattttgaatatattataatggacagagtgtttgaaatactaaattcagggtttaaatagcttctatcaaatgtgtaaatataagtgttataaaatgtttggtaaatatttatcaaaattatcaaatgtcaattatcctaaattgattttttttccttcttcaaattatgtattggccagatgtatcttaactttgaggtcagggggaaaagctgttaaacagatctcatgatttttgagcttacttgggtgtgggttggtgaactggttgctgacaaaatctctgtacagagaaagagtgttgcacatggtttctgtcatcattctctgtgcccttttttttttttctttctttttttattctccagtttgccatcattttgagaagtgaggtgtttggagtgggacatgaccaaactgagtgcagctttgtaatcagccagctggggactcctgactggactttagagattttggtaaattttggttgagcagatctttagttttctgtgtggaaggtagtcagagattgatgttcagttggacacatacattcaaattcactcattgaccttcagctcctccatggtcagccccatcagctgggaatccagctggagagttttgattaatttagaaaatagagcctgcattttagtaagcacactttcctaggtaagagattaggtaggcttaaatcgatatttacgtgttgacagcattgactttataagttagatacagtgggggtggttgggattgatgctccatagtcttttggaggcttgggaaggaggtagggggcagtctcttgctgtactaatctctaatggcttagaataaatgtctctttctaagtgtttattagagttaagcttgaattagggttggatacatgttatcatgttgttaagcggtaagagtttgtcacaggttaagaatagtctccatgtttgataaagcagctagtcagaaattaatagggaaatctgtggataggttcaaaatggtattgggggcctgggaaatagcagataaaattatatttttgaaagaatgtcaggcgctgatgtgttcagaaaatatctcctactaggttaagtgaaatgagataagctaagatacattttgaggttaacattcatttaacattaaatattttctaagggccaatatgtgatcagcactgtgctgtatactggggatgcaattatgaacaagatggaaggcatctccagcctttgtagagcttatgttttagctgtgaagacagactggaacttgtttaaaaacaaaacaaaacagaaaaattgcctttatgatgagctggggaagtaaacagacatcataattgctatgaagaaaaccagggatgagttttagtgtggggttctagttttattttgggttgagaaagcttttctaaggaggtgaaatcttaattgagagcaaaaagttgttaggtacataaggtgtgggggaccattagtattacaaactgcatgtgctgaagctcgaaagcagatagctctgatgttcagggagctagctggaagaagtctggtgtggctggattgagggggagtggggagtgggcaggggaatgctgttgtacaagatgaggtggcagaatgaggttgtggccaaatcaagcagagtttggcttttattaagatcagtctggttgctagattggaggtgggtaaaagagtagatgctgacagtcatcaggtgagagaggatggtgttatagattatggcagtagcagtggagatagaaagagggtcatttgaagtatgttttttgaaggcaggtggacaggatttgctgatgggtaaatggcagagttagggggactgttagaacagagaaagaaatcatggggttgggtttgagtctgttggggaaatggtggtgcctgttttgagatggggaagatttctgggagataagtggtttgatggacaggatcaagagttctgttttggatgtgttaattctgaaatgtctgagacatccaaatggagatgtcaagtaggcagttgaacatgagtttggagctcagtggagagctggaaatatcaatttgaattgtcatcaaagaaatatttaaatctgtaggaaatgatgaatttgtgtgtggaaagaatatagacagacagtaatactcaaaaccaagccctcgtaacattcagaaatgggtgaactagcagctagcagaggagtcctaaggagtttgccatctagggggtaggaggaaaaccaggagagaggtttccatgaagttgagagaaaaagagagtcccctgttcttagtgagtacatctaaaattaataattaatgaaattttcaagtgaatacgaaagtagaataaagttgtaattactttcttcaccgggaaagtaataagtaaataaagactatttagtggcattgagatttcaagagtaatttcttcagtaattttgcaagattattcatattacctactcaaccagactccataattgggctcaggagggaaggctttcccttagagaagcagagttctgttcgtctgaatgttgtccagtcaggctttgggacttaaaaatgcttttgaggattcttaggtccttttttttttttttttggcctgtggactgaacatagctgttcagtgtgtatcattatttattgcctttctcttactatagattatttctcacaggagaagaagttattgctggtagcatgtcagtttacatgtgtctagctcccatctctggaacacataattaagtgtggtcgacatatattcttcttcatttttgccgttgagaaagctgtcagaaatgttacatctggagaacaggaaagactaccctcaaagccagcgttggcctaagtgtactcttaaacatttcctgtggatgtgtggaccgcctgtctctctatctcttcatgacttctgcctgtgtcttgtgtgtgcagaggccaaatagtagtagcagagatggaaaaccttctcctacacatgtgcaccagcatggtcctttgtctctctctttcatttgctcttcaaggcttcgctcaaatactgcttccattctgtaattttctcttcccagcgcacccgtgggacctgttacattgagttagaggcagtattacacggtggtttcttttggagagactggctagactacgtatacatagcctcttggttagttacataccttctcagtgcctcagttccttcatctgtaaaaccacatggggttgtgtgaggattatatgagttaatacatgtaaagcactcagagtagtgcctggcatataagggctcaaaaattgttagttgttgatgctgttgttgctgtttataaggcttgcgtgcatttcttttcttcatttgttttgggaatggtgaaggcatataatgtattattcattatcttcttaatatgtttcatgtaatagacaaatatttttatgtagttactaaggcagataacttctgcatgtcttatttttctctaaaatggtaagcatacatataagtatcttgttacttgtgtgtgaccctagattgcttggttgtcagtatctcttaataaagattttccctttcatctgtttgtagaagcctcatcagctgggctggtattagtaaaaggaagatgactagaaaattcacttggagatcacatggactcttttattattaaattaaataattcatttttcatgtatacaacactcattaattggggttgtgtttattggtgaaaacatttttttcttaaaatgaaatctttaatttttttacattaattatacttagtatgaggcacttttgcttcattcttacaggtaggcgaattgtagaggtcttacgtctttgctgggcctgccaccatcaatagtttaggagaataatagcttttgaaatgtataaggccttacttaaaccaaaaaatatgctttacaatgcaatttctaacagggtcttaattcatttgttaatatttcttcagaacgtgggcttaaattttgttttaaagtcttatacaaactcttgaggggaaatttttttttagtgttttccgctttagtttgtcttttttgatgatgcagctcaacaaccataaatacattcaggactcacaggttgacattttaatcattccatccacaagtactcagaactgtggggacctggaataaatatgagatatggcctcttgactttagtttataatctttattgttgaaaaaagcctggttcccttgaaatagttagagaaaaatattggaaagcatatagaaggaagtgtggtatagtagtaagataattcatctagtagtcttgttcatttattcactaaaagcctgctgagcactttcatctccttagtgtcaaaacctgagttttgtcacaagatccgccactgtgaaattgagcaagtaccattcctttaccagatttactccacctgccttgtaggatcatacatgatcatgtatatgaaagcttctagaacactaaagcattgtgcaaatgtaaagagttatataatgttacattgttcgggagaggccatgcctgtggtagcagttaaaaggaacaaaactttgagagttgaactagttaggttgggtgggattttccccttaagaaaccatcatcagtaaaggctgttttttaaaagctagtatataggattaataaagtacaggttgagtatctcttacctgagatgcttgggaccaaaagccttttggatttcagaatttgaattttggaatatttgcatattcataatgagcgatcttcaggatgtggcctaagtctaaacatgaaatgcatttatgtttcttacacaccttatacacatagcctgaaggtagttttatttctcccatggggacgctgaataaactgtgtattgtgtgcctgcgatctgactgggacctgccacatggggttaggtgtggagtttcccacttgtggcatcatgtcagtgctgaaagtttttgattttggagcatttcagatttcagcttttcagattaggaatgttcaacctctagccggagaaagaagatagttttctataagatggaaaatttatccagtcatgcctttttggaacatgcgtgaatttgttgagtaactgaaatgtataccttcaggttcctaaatttaatttatgtgagataaaatttgtttctaagtagttttatatttccctcttctttgaaacagtatgagtttaacattttcttattagtttaggacctcattctcaacctcagttatgataccgtaatatagtgatcaattatggaactactaagttatcgaggtaataggactcttgtctcatgccctaagaaggacttcaggctgcccatttaaaaaaattgagatataatttaaataccatacaattcactcttttaaattatgcaattcagtagtttctagtgtactcacaacgttgtgcaactgtcactgtcattacttccaaaacattttcatcatcctagaaaggaaccccacatccattagcattctccattcccccctcccccccagcttctggcaaccacgaatcgactttctgtctctatggatttgtctattctgggcattttgtataaatggaatcatacaaggtgtggccttttatatctggtgtctttcacttaacataattaaagcatttagttttataataaaaaaggctaggcaaataattgagtggaggttgggaggtttaagagattccattaaagaagaaggtgaaataagggggagagatgagatcagatgaagttcagatttagcaaacattgagtattacataagccaggcactgtgctaagtctgttgggtgatagagcagaagaggttctaaaagatatgctgtttttccatcctttgcttgatgatttggactttgagtagaaaggacagttttatcctcttgatgtacagaattacagaatgaattctttgaaaaggagtaggaaagcagatcagtcagcttttgcttagtatgatttattcctcttttaaagtgtaatttctgtttctacctagtttcaagtaagttttgaggcatgtagggctctgccacatgatgccagccttgtcctggggtataacttttttatggatcataaaggagcctggttaaagtttggaactattatagactgggagaataggcatctcaataatatccctttataccttactgcttattatttaaggttaggataattgggtaaacattcaccattcacattttattagctggtaactacgctttctcatttattccagagaataaggacagtccttcctttcgcccaattttacttgtttttctaaattttatttctttagcttagcattgcttacagggcttaattaagttttgtttcatactgttctggagctatactagtggattacccaatgaaattttttttcctatgtggtaaattgttcaaacacttaccaaataaacagctaacttgggtaatactttatgacaatgtgtagctgcatggcagtgtgcttttactatcaatactcagttctggttttatcatattattcttaataaatagtaacaaccaagttatttggtttagggagaaaatctgccatgaggtatctttgtgtctgtggcacacagccacactgtttatgccattatgaacctgcaaagctcactgtgtctgcagtgaaagctgcagatgaaatctgataggatctcttggcattttcacttctacgattatacattgaatatagggatgaattaagccctttgtattgttgagctgtgattaagattactggatagcttaagtattttctctttttgtccacatacccagtaacttgggtcaaaattattaatccattagagtgtatgcagtaactttttttcttttgtagtgttgtgacctttaatgatggagcatttcatagatgtgctaaatgaaggttaataacggtgaaaatttattatattgattagctacttatatattaacacttaaggtttaattttatttaaattttatttttcttaggctgtctgtaaaatcttctcatttaaaatttagcttctgtggataactgtttactcattgccccatatgaatatttaataggcacttcaacaagtccaaaacaacttctgcttcccctcccaaatctgcttcacccagtctttttcatttcagttaatagcaaatctgtctttccatttaggagtcattgattcctttttctctctcactctacgttcattctgtcatcaaatcgtttttgtcctaccttcagaatacatctagagtctaatcacttcccactttctccattgttactattatggtccaagccgtcttcatatcttgcttgagttattgccacaccctcccaacaggtctcccttcttccatccttccttctatatagtctattcttaatatgacagccagaatgatcttttaaacatgaaagtgagatcatattactccttgtgttcccattacaatggcctttgagagtgatcagggccccctttgtctctctgaccttattgcttattctcttgatcactctgctgccgctacgctggcctcttccctgtccctcaaatgtgccagacatgcttccatcttagggtctctgcactggctatttcctcaaatgtcatctcggtgaggctaaccctgatcaccctacctcaatacacccaattatttttactccgctttttctttccgtaggagttaacacctcctaacatttacttctatcagtttcttatgattaactgtgttgtgtattccctcccattagaatgtgaatatctgaaagacacttacagtttgaaaagtgcctggaacgtagtaaatgttcaataaattgcacttcattgatatttattggcaacataacattattaccactcctcagaagcctgccacatcttccctatcatttatacctctccccaagcctgatgtttttgtttcttgtcttaatatagagacaaggtcttactttcacccaggctggagctcagtggcatgatcatagctcactgcaacctgtatcttttgtgctcaagctatcctgctgcctcagcctctcaagtagctgagactacaggattgggctaacacacctagctaaatttttatttttatttttttgtagagatggagtcttgctgtgttgcccaggctggtcttgaaactcatgacctcctgccttgacctcccaaatgatcctcctgctttgacctcccaaagcactgggattataggcatgaatcatcaagcctggccaagtctgatggtttttaaagttgtttttagtatgattgaatatgattctcatacaaataaaggtctgctgtatagtagtaatctgttgcatagaactttgttcttcaggtgaggtgtgagtcacatccttttatcttgtttgttttttttccccgccccccgcccccccagtatagtcatgagcagtccacaaagccaaaatatacattgaaacagaaagactatttgttaaatttatggaaatatgttttaaattgtttctacaatcttctttgcttctaagaattcaaatgtcacaggaataaaagctttcaccattttaccagaatctgtaggatttagatgatggtcattttattctgttgacagtatggagcactttgcagatggatatcaggttaattgttatattgaaaagtgaaggagtacattctactaacagtctttctgctgagaaaaatctaattattgccattaaggtggcattaagttagtaaattgggtaaataaacagttaaaatccccaaatttcttataacatgccataattgctttgcttgaaaatagttatcggccaggcgcagtggctcacacctgtaatccctgccatttgggaggctgaggcgggaggatcacctgaggtcaggagttcgagacctgcctggccaacatggtgaaaccctgtctctactaaaaacacaaaacttaggtgggtgtgttggcttatgcctgtgatcccagctacttgggaggctgaggcaggagaattgcttgaacctgggaggcggaggttgcagtgagctgagatcatgccactgcactccagcctgggcgacagagtgagacgctgtttcaaaaaaaaaaaagaaaagaaaagaaaagaaaatagttatcactgaatagaaatataagatgatcaaataactattgaagttaaaggaaactacaaagaaaatctccaaaggacgccatcctagtttgtttttttgttaagcactattcacctgctgcactagagccagcaatatggacaaacaatactactactaataccattatttgttaggcacttatgaggtagcaggtctcatgcttcatcttttatgctcccagcagttctgtaatggcagagaatagcattttgtttttctaaatacattcaatctctgagcctcagtgttcccctcagacctctcagatcctgggccctttaccctacattttatggcccgcttccctttctgcttctttctgatcattttattttgtatttgatgttctgagttttctctaaagaacaacatatattcgttttagattaatggctttaagaaaatcatttattgttaagaatagtacagttttgtggctcagcaaaaaataattctactgttcagccataatcattttggcaagtttacagcctttttctcaagcgttggttagattaactgaacttctgaatacctttgtggtattttaaaaatctgaaatcacttgtctacaaatagtatttctttttttttttttggccttaaagttttaataatgaaatttttctatgtagtcctctttaaaatatttaagtatagtaggaagcagcagagtttgttccacctaatgtcaattcagagaacattttacattttatattaaaattatgatgccttaggatcgttcttttacctgtgtatttattcattttcacactcgggagttttagttgccactccatatcagtggcacagccatgatgatttttcccttgtccaatcatgaaggtttaaaaaaacctgtacagtttttagtctcttattatgatatcaattaaggtgattttataggaagaatatcaattaagggtgattttataggaagaaaaatgtaccctgcatttcatttggaaaaaaaaaaagaatcaactattaaatgaggaaattaaaaaaaagtttaggtttaaaaagaaacatacttaggagaaacttttaagctgcatatgccttatgtgagaattttaaccaagaaagactaaatgatcttttataattatgttgtcaccatatgtttgcagattcatatttgcatacattatttatatataaagatagattagtgtctagctttatgtgcattccattttgtaatacacattcttttagcaggttatgtatgtcttcatgcagttgacttttctgtatttgtgtgctttagcctccttaatgaagatttttacagtcaaagtggaagagggccaactttttattgttagtacagcaacataattaactatacaaggtttgtttattatagctgagtactagaacaatgcttcaaagaggaaaacgtacagagaagattagtaaataacatagcaatgtgtgaggctggccaattgtaataatgcctttattgggtggttcttgaatttgtaagcacatgcttacatttttcagataataggaatgaaaatgtgtaattttaattgctatttctgttgcatttttataagaaaataatggaaactttgcttggatgaatgattgtattggagaaatgttttgtatactttggttctgaaatactttgagctcttttatacaaatgaatagtgttaggtaagactccaaggtacaaattgtattactgctgaatcagatctgaagaacagtgataaattgcaatgatttatttaattatagaataaaaatttgcagtcgggttaataccatgcagctgatttagagctttgttcatcccacattttctgggaaggtcctgatttcagatactccttattttcttcttatgtaaatacatttagaaatgagaatatcctttgggcttattacggtctagtaaatgtcattaaccaatattttaggtactgtggagatacaaaaaagatgagatagtggaaagatgttgagattgtaaccatttacataaaaatgggagggtcataggaaaaaactccatagagcacttactgtctgataaaagagggtatataattgataagttttacaatgtttgaaagaagatgcaaagaaaatattgagttctcatatgtggtaaacattatgctgaatattgtcatattctcatttatttaaatttcacatcaccctcattttatagttggggtgactgaatctcagagagtttacattgttgaaggtcatacaaagccaaaattcaaatcctaactgtaaatcttattttctttctattaaatcattataaatgaatggaaacccttaaaggatataattctttcaaattgactgaattgacacaaaatattggatatctttatttaaatactacaactaaacttaataaaatatcacaggccgtatttagatcttaaatttattcaggtagtaagggacctttgatatccatagtaatagcatgaataattgaagccatcaaagtaataagccaattttgtttagtaataatatattagagtagaattttacagttttaaagggcaccatcatatctgttatcttagcatcttaaaccttttatgaggtctaccaaataattggttttgtttcctcttgacctttgtaaaatgaagaaaaaccatgcctctttgagttcataaactgtgttttgcatatttacacacatacatcttttatcctcccaccaattatttgacctgaggttgaacacttaatggataagtaggtggataaaatgataagtaaaataacacatttaaaaaggagaagcaggagacttcaggtgaatagctacccataagttgttgaaaataatcaatatttatatttattggcatccagtcaataaatatatatgagctagtcttgttctatcacccaagctggcatgcagtggtgtgatcatggctcgccgaagcctccacatcctgggctcaagtggggctcaagtgatccttccacctcagcctcccaagtagttgggactacaggtgtatgccaccatgcgtggctaatttttttttttttttcgagatggagtctcgctctgtcgcccaggctggagtgcagtggcgcaatctcggctcactgcaagctccgcctcccaggttcacgccattgacctgcctcagcctcctgagtagctgggactacaggcgcccgccaccatgcctggctaatttttttttttttttttttttgtatttttagtagacacggggtttcagtatgttggccaggatggtcttgatctcctgacctcatgatccgcccacctcagcctcccaaagttctgggattacaggcatgagccactgtgcccggccatgcctggctaatttttttaaaattttttgtagagatgggggcctttccatgtcgaccaaactgttgttaaattcctgggctcaaacagtcctcctgcctcagcctcccagagtgctgggcttatagccactgcacctgaccagtaaagatattttgagctttgagtagtacctggttattatcggttaaaaatgaaacattttataagtcttttgttctattgaaaaaccacagtggaatatgtgtgtcttccccaagaattatgacaaagcatgtggatcattgcctggcatatagtaggtatttggttatttattaagtaaattaaaaaccacaatgtagactttctggacttaaaaagaaaaaaatagagacggagtcatgctgtgtggccaggctggtctcctgagctcaagggttcttcttgcctcagcctccctagtagcttgggctacatgtgtgtgttaatatgctcagctaatttaaaaacgttttttattgtagagacagagtcttgttatgttgcccacgttggtcttgaaatcctagacccaagcagtcctcctgcctcagctcccaaagtgcctttctgggctttttattcttttttgattttcttcagaaagccagttcctaaataataaaaaaagtaaaagaatttatttattctctttttattccaatttattaattaatactcaaatattaatgtaaaactaggttggtttcatattgttctggtactgtattgtcttattttttattatctgatatctgaatcagaaaataacctagttacatattatttagtctctgagtgtattttttttttttttttgagacggagtctcgctctgtcaccaggctggagtgcaatggcatgatctcggctcaccagaacctctgcctcccgcgtacaagcgattctcctgcctcagcctcctgagtagctgggattacaggtgcccgccaccaagcctggctaatttttgtattttcagtaggacggggtttctccatattggtcaggctggtctcaaactctcaacctcaggtgatctgtctgccttggcctcccaaagtgctgggattacaggtgtgaggtattattttttaagtaggagtatttggacctaaacaggcagaattcttcaacaaagtacaatgaaaggcatttctttgacagtagcctgaatttggaggctcatttgcaaaggcactttccactgccactctaccccagaaattgcttatgaaataattctggcatttactccttcttcctcccctcccccttttattaaagagactagcttgtacaaagtcatttgcaaattcatttgtggttctccattttgattcagatagcaactctaaagactgagttataaaagtctttagactttgcagtttaaaagaacgataatattaccatgtaaaaattctgattagcataaagctttagaaagtccgttgcgtataccaagccaagtgcatttttgtctccaattcccaattctaatcaatttcgtcctcatttttcactattgcaaaagtgtagatcatgatgcccatcttttttgtagtcgagtacattttttcttccatcaaaaaagcaattagtgtcctgatgtacttcagcttcacacatttctgtagatgatttgatcaggttgttgtcttcacgacagacatctgattgtttttgaatgtgggaacactccttagacaacatggccagaattaacccacatcctcactggtgttccacaccttctcatatgtaggagaggaatttctctgtcatttccctgagactgcaccttaattctctactataatccttgactgaaggaaaagttaggcgatcaggtggaatttttaaattgttccacaaaaaactgagttctgctagctaagtggaatgttgagaatttagaacattcagcacaataaaatataaacattaaatttgtatggcattagaaccgcctttagaatttttagtggaagcgttagatcacatgcatttcactttagttaatttctgtaaattcaactatgtatagtcttctttacgaaaaggagagaacatacttgagaaatataatttaagagtgcaagtgagagtcattcagccattccttttattctgatcagtgaatgtgtgtccctgagtgagagatggaagaagtccttttagttcttgattgcatttcatagtgtgaatagctcccttccctgacagtgatttttagtctttcctaaacttagtcagctacttcatctgttattcagccgaatgaacagtgagtgatctgttgcagtgctagaggaacattggctgttttggccttattgaagaatacttgaccgactgatttaagagctattcaaaggtaattttgagtatgcaatttttgccttttgcaactaccttaggaccttattctggccgggtgcagtggctcatgcctgtaattctagcactttgagaggctgacgtgggaggattgcttgagcccaggagtttgagaccagcctgggcaacatggcgaaaccttgtctctccaaaaaatacaaaaattagctgggcatggtggcacacacctgtagtcccagctacttgggaggttgaggtaggaggattgctttgagcctgggaggcggaagtttcagtgagccgagattgcaccaccacaccccagcctgggcaacagagcaagaccctgtctcaaaaaaaaaaaaaagaacctaattctggagtaagatatgactttaccataatttgtgaattaaggattaacaaggtcagcagagctgaagccaagtgaaagcatttgagaacaaatgactgaaaaatactggatatatggtaagatatgtgtagaaaaagaactctttaagcaattttcattaaaagcttcttagtatgttttccagatactaaaaattttggtcactggaaacaattgggaagcaaagagattgattcaggataaacgtagttaaattagccaagattagggattccagtgaccttgaaaataaatgtgtagattaaaattcaggttattttaatttgatggctaaaataaaatgtgtgtattaactcagatttttttttttttaaattttgagatggagtcttgctctttcgcgcagactggagtgcagtggcatgatctcggctcactgcaagctctgctttctgggttcatgccattctcctgcctcagcctcccaagtagctgggactacaggcacccgccaccacacctggctaatttttttgtatttttagtagagatggggtttcactgtgttagctaggatagtctcgatctcctgacctcatgatccgcctgcctctgcctcccaaagtgctgggactacaggcgtgagccaccgcatccggcctaacagaattttaagaatacatattcttgaatgattgcagagtaggtggtaagttatatgccagacactgatctaagtggtttgcctgtcttacccctttaatctaggagggtagatagatgctgttctgggagctttatggatgctagttctcagtaactctgagtaaggactgttgttaccacaaccttgcaggtgagaaactgcaatatagtcacaattagaaacttgccaaagtcacagccattaagtagataagccatgattcagatcaaaccacctggctccatttcctgtactattaacctatcttctacgctggtctttaattctcttttacattattattgtctcatctgtaaaggttcaaatgcctactccagttccttgaagtggctgctttgaggtttctgagaccaggtctatactcagtaaaatttttctgaatttgtattagaggttgttttatgaacatgagattggaaaaatggtggcatgaactcacttctaacttcatatcaaactagatcaccagaaaactatttagtcctatattttagtattgtttcctcatattctgtcaatttttgttagatgcatttgtatgaagaatatttctgcatctgcgatgaaactattgaatgcattgtctcttatgatactctgttccctttataagaattaatgtgataaattattcaagaatttagtttcagagaaaagtttctttccttatgatatggcatacttccttctatcagtcattaagaattatatattctgttgagtttttctgtttgctttggctgcaagaaagcttggagttatatgtcacttcaattatagtaactttattagcctaggcttctgatatgggtaatttcttctcagtcctctgtggcaggagtatttatttattggagacagagtcgcactctgtcgcccaggctggcatgcactagcaccattatagctcactgcaaccttgaattcctgggctcaagtgatcctcctgcctcagcctcccaggtagctgggactacaggtgcatgccatcatgcttctaattaaaaaaagattatttgtaaagacagggtcttgctatgttgcccacgctggtctcaaactcctgggctcagtcctcccacctctgtctcccaaagcactgggattactgtgcctagcctgtgacaggagcttttaattcatcgtgtgtgtatcagcttcagggagctgatgaacccttctgaaatgatcagtaaacttgcttgtgtgcaagcttgtgtgggaatctgggggagcatcgttagcttctctcagattttccatgacctcctcccaacgcccccctcaaaaagatgaagaaccgttattctctgggttgacttttcattttatgttataatggtctaattgtgtatctcttattgtaagcctctggtagtctctttggtgatagttgggctattaatcatacatttacattcgaatcatcatccaatttctcagttgtcagaaagttaaagagcagcctctctgtaattttaaaaacatgcagtcttggaaacttaagaaagttgtcgacatgttcatgcaacccatgtacctactatgtttgttttctatgaaaggagcttgtctctcttaaattaccttaaataagtaatagtaaattatttgtaaagtgattcattattaacttctgtttagaattaacatattcaaaccataaagcatgtatgcaaacagtattcccatatcctttttctttgttttttaggtaagcagaaaaagttataaaattataataatctctctcgactatttatgtattaggagatccaactcttccaaaaaacatggctagggtaaggttaccagcaatgatttgctatacccatacatttataggcaaatgctataccattagaggaaaataaagccagtgctgctaacctcatcactcagattaatttccacagctgtcattttaacagtgttattataggtcttcaaatgaaaattatgttaacaggtactccacataaatgtgctgtaatccaagggggcacatgtattatatttttgattgtagtaagctttttggcctaattgactatttctctgcaacaaaaaaattagttaaactggaaaagcataataaagctatatgctctttactaggtgatatcttggtggtttaaatttacaagttgtgtatacatacatattttcctgttgaagacttgatgactgactgaaaatgtaccagggtgtcatcaccataaaagttgttgcatctatgaactatacagcagtgtgtatgatggtgtgagttataataaactattcattagttttttgctgcatagttttaggatgctgtaacagtgatcttgaggactatgacttaaaaaaatgaataacactatcattcagcttgctactctgcagacaatgtgtatgaaaaagaatttgtgtgatttaacctcagacattaaaattggtttgccagtaaaacaaaacaagattaaaaaaaatttttttttttaattttttgagacggagtctagctctggcgcctaggctggagtgcagtagcacgatctcagctcactgcaacctctgcctcctcggttcaagcgattctcctgcctcagcctcctcagtagctgggattacaggcacgtgccgccgcatccagctgatttttgtatttttagtagagacgaggtttcaccatgttgctcagtctggtcttgaactcctgatctctggtgatccacccacctcggtctcccaaagtgctggtattacaggcgtgagccaccacacctggccaccagattttcttaaaccatattatttatgtccccgcagtagaaagaacacatcaaatctgcagcattgccttgtcattcattatggagtgtattttactttcatatctaaattgattaatcagcttgtaaagagactagtaagaatccaataatggctgctgttttctaaattttatcttttaataaagaatatgtaagaagcatttattgaatgcttagcatgtgaaagatactgaaataggttctttggaggcatgcagagatgacatattccttacctgtggtttaagggttaaatataaaagaaaataaaactaggagaaaacagatttggaggctgacttctagaaatgttagaagaaattataaagaaaataataatcgatttgactagataaaattacacactaaaatgcttttaaaaagtatgtctttggtgaagagggaggaaaagaaaatactccacaaaaagcaaacaacaaactggaaaaatgtattcacagtgagacaggcagagaatgacaaaccagtaaaaatacccatgatgactgtgataggtaaatgggcatagtacacaaactgttcacaaaggaggaaatatggttagtaaacaggcatgtgggatatgtgttcagccttgttagtaatctaggaaatgagacttaaaacaagaaattgtacatagtgctgctgaaactactaccattgctactggactgtgaaaggtataattctaaattgaaagcacattggtactgtgcttcagtagcaacaaaaatgttagttcataatctttaattcagtaatttcatataaggggctctagcttatggaaaatgataaaaaatatggactgttacctgtaacaatgaaaatgtggaagtgaacaatattatgtgaagagaaatagctgagtaaattaggattagtccattcattggatggttatatatccaataaaaataaataggcaaggtatatagtagtatgaaaagatgcatatgaaaggactagattatatgtaaattgtgattatgagtttataaagtataaatatgaaaaatccctagaaaaagataatttataatccttgtgctacagtaatgagttgcaggtgatctttcttctgacctctctcaaatagggtatattaattttaaaatttaaatttagatttgtgattttaagaaaatttagttctagctctcaaggaactgccagtctaataggatagaactacactaaaaagaaatgtgctattgacatgaaagagacataaccacatgttctgagagtaccctcaaatatagttttgtattttatggagtgcttataaagtctccaggcatatatctggtggtgggaatgaattaagatgaataactgggtccttgctccaagagacctctgctttagttgaagagactcatttttgcatctaattagaccctgataccaatcacactttattaaatatgccaactgatgcttacatcaagaatgacttgaaagcatggggaagaggtaattttgaccaagggatgctgggttaatcctgggtttagggaacatctggttgcccagtttctggaagtgtgcgtaggtatttgtggggcagtaataggagagtccagtagccggtgtttaagaagctggtccaggctagtttgtgcaagttcctagaaatacagagatgaaaaagcctgtgttctcaagggacatgttgaccagtgtgggagctaataattaactaaaaatccagtacattggcttaaatttgtatgttaaggtatatctggcttcattgaaattcctattcacaaaattctcattcaagatattgtgttgttctaatggaaattataggatactgtgggattatatggaaagggtttgggggtgtttgatcctggctggggaggagtagccaagaaggacttgctataggaggccacagtgagctgggttttcaaagataagtagaaattagaagagagaatggatgtgaggggaagaggaagctggaaaggcagggtgtggccagataattcttaaggtccttgtataatcttaaagggatttaggaactcagcttctttaaggctttttttttccccccttatgtctcatgatatgttagtaagcatatggccatgtttagaagaaagtaatgaaaaggataagccagtgctgcataagtggtttctgaaggcatataacctggccatcttaagaacagttcgttgagaaattgctgagatcagtttaaggagtaacttcctttttttttttttttttttttttttgagacagggcctcactatgttgcccaggctggagtgcagtggcgtgatcacagctcactataatctcctcccatgctcaagcgaccctcccacatcagcctcctaggtagatgggactacaggcacacaccactgtgccccgctaatttttgtagttttttttttttttggtaacgatagggttttgccatattgcgcaggctggtctcgaactcctcagctcaagcgatccgtgttcctcagcctcccaaagtgctgggattacaggcgtgagctaccatgccaggacaaggagtaatatttatttgactgttttattaacatcaggcacttaaaataacgcagtgtagaagagaagtaaaagatacaggcttactatttattaatgatttgctgtgtcaacagagagcaaacatttagggatttagtgaggcagctcaaaggggattgagaaataaagttgtagagtcaaagtagagagaaaaagggcatttccagataattgacactgatctaggtgggaagtgatcagtctaagctctctcttttttctattttacagaagtatgagcttctgaacattttgccttttatcacatatggtacctctgtcttgattttcagcagatttagcaaaaatctaaactattttactattggatacatatcacagtatctgggaataatcatactctccagcaaagcagcttctggccatgtgcagtggtgcatacctgtagttctagctaccctggaggctgaggcaggaggattgcttgaacccaggagtttgaggctgtggtaagcaatgattttgcctgtgaatagccactgcagttcagcctgggcaacacggcaagactctgcctctaaaaataaataaaagacagcttctgagagtatttattagtaaacttgctttcccaaaacagcttttgagtttagttctggagacagcactgtgctgcctatcatagaccactataaagagatcattctgttttcctgctctttagaataaagctagcatatgagttgcaaccacctaatttttctttcgttcttaatttctggttacagagttctttttgggatacacatgctttttagtgcattatgggaaagacttcactgaagttaataggattgtatttatagtctcatcatgatatttctaattaaaatgatgattgtttattttagccatttgtacatctaagtaaaatattgttactgccttgtcatatttgaatacttgggaatttatagaactgtttttattagccttttaaaggatactccgtaacaaagtatacgtgtgtgtattttcattatataaactaaaacttttgcattgtaatttttgacaaaaaaaactgtagcttcaaactatattctttgagcagtatgatttttaattaagaacattaaagttcttagttataaattttaaaaagcaatgaaagtgatttgttgaggttatggttaatttctttgaaagcaattaataaaatccctttgaaattaggatttatatattttcataattcttaagactaaggtcagtagcatgctgtattttctcttctgaattctttctacattttaacacagtgcgttacatatttgatttttaatctttcacgtgggagctttatctacttatctctaaggcctgcatgcgtccttgctctcacacacgcacatataaaatcactttgtccttattactgtccattccattttcttctccctgaggttgccagaaaggcctctggtctagcttgagtaatatgcagtctgtttcagttcttcctaacctgcctgcatgttttgatggaacaccaggcacttatgtaagaatagaagcctatttatttaggtcgtgtgaaccacgaaggaactggcaccaacatattcatttctcccctttgctacttcaggtcttgagaagagtgtgcttttatggaccatgtattcttttctctggatggatgtagcttgtgggagaagctattgtaataagttcttctgaaccacagctcttctgtgtgggtcttcatctttcaggagactccaaacctgaactgtaatggtttcatgttatcatctaaatggaatggatgtaatgacacccagagcacatggctcaggctaagatctttcttggtaatctttctctatccagctcttcatcagagcaggactagctcttcactggttccttgactccaggactgtgaaaccaggaaatgaactttccttcttatatttctgcttctgcctaagggccaatttcataagtggaggtctgcaacaaaatagatgtacttaagcaagatgaagctccattgctttatcttgcttaagacgggtttaataggaatttcttctggctgtttcccgtgccccccccccccccccacttttttttttttttttttttttttaagatattagagtctcatgaggcccagactggactctaattcctaggcacaagtgatcctcccacctcagcctccgtagtagctgggactataggcacaggccaccatggctggttttactttttttttggttcatggtacatttgaaaccaaaacatacccaatatctagtcatattaaaattacttttatctctctctctcttaatttggagaaaatagtattttgtgggaaaatttatagtatataggctggcatttgctttactctcacaatcctataggattataaaattagaattttatgaaatatcctatacttggtgtaattccttattttctgtatttttgcttttctttcatttagatctctttcgtctattcctctactatcattaaaaaattatcttcctaggagaggtgattattggaaatggattaaaaaaaggttaatgagaagagatgacaatacatatgtaactatgtgattggctctgtaaagtatgaataattatactaataatggtggttaagcctagcataggaatgggattggaatgctagcaggatggaatggcaactaaatatgcaagatgagaccatgttattgagcacaccgaaggtaagatcaagaatttacattggattagagaggcaaaacagtcgattcctcacaaggggagcaaagatggtgactagcagatattttcggtaggacaaaaagggagagcgatgtcaccagaagttgagagtagaaaaagagaaaggatgagtcatggtattggaaatagttttgatggaagtcatgttaatagtgatagtaaagagaagaaaaacaatttaaacatgttcgtatcaacggactttagtatggcctgttgaaaaaagtcacctaacctactgcttttgaatgcattgattttaagtagtttgcctttgtatatcagttttgttaataacaacgacagtaaaatgagctgtctacccaaaatttagattattatgttgattataacaaacatctttattttggtaatgagcttataaaaatgaatctaggtcgggtgtggtggctcacgcctataatcccaccacgttgggaggccgaggcgggcagatcacgagctcaggagatggagaccatcctggctaacatggtaaaaccttgtctctactaaaaatacaaaaaattagccgggcgtggtggcgggcgcctgtagtcccagctactcgggaggctgaggcaggagaatggcgtgaacccgggaggcggagcttgcattgagctgagattgttccactgcactccagcctgggtgacagagagagactctgtctcaaaaaaagaaaaaaaaaaaaaaaaaaaaaaaagattctaaccccaggaaaggagaaggtatttgtcataattgtcataatgttttgacttatacaaaataagactttttctgaaacacagaaatccttgacagtttatttctttaagataaccaattttatacaggtgaattcttttaaaattgaacattgtagtggaaaagacgtcacaagtcactttagggtatggaaaagtgtggaacaggggcataaatattaccaaccagcacttctgcgggcagtcttcccacatccagtgaggccccctaaatcactgtctacttccttgtatatgtgtgtgtgcgtttgtgcacatgcatgcatacatgtgttcatggccatgaactaggagttatcccaagtgtagctgtgctcgctaagtcttatatttaagttatcttttgggcatggtttggcaagaggttaggtttttttcccttttctgtaaatatttagtgaaagcactccattgtttgctactgaatttttttcttatttttaaaaaagtattgtttgaaaaccttacatgatggcttgcatctgtaattccagctacttaggagattgaggcaggaagatcactatggcacacatatacctgtgtaacaaacctacatgttctgcacatgtatcctggaactttaaaaaaaaaaaagtcttgactcaaatattgtaatttttcttggagtaaaatttaggggccaaaggctgtattacatgtgtgaatataacatacagaaaaattaccttacatcatatataccctgtggaaattatttggatgattcagcgtattggaagaggttgatggggccctaaccatgaaaaacttcagtgtaagattttaaggtaagaggaccctcgagagttttcccaattctgaaacaaaagtgaaattcaccagctttgcctattaacttttctctgctttatagtgtcaataagaggtgtggatggaaacacatggaattagatcagtagactgcaaaatcctgcttaagttcattaaatatagtactagtctggaattctcttttctcacaaaagtaaattttttaaattgaaatgttgttatcccttttatgtgatttaaaatagagtttaatctgacatccctggtttatctttttgattcatcacaatggtgtcctagatgtgtatacaacattgttgggttaaaaattactgatttgtgtgtctttgaaagcatctgaaaaggaaatttctaatagttcttttttgtttgatgacacattataaataagcctaatggatatattatgcaatttaaaaacagtattgtctaatccatttattatatgtttataatgctatatattttttaatttaaaaacatttgtaaattattagcctgtgccaaattgtacttgaattattttcagtctgccaagaatgtttcattctgtacttttaattaaaagactgtatatgaaaacccagaaaatatgaaatgtaggatatggaaatgatacagttctttaaaccaattatgtgtaaaaattcacttttttgaaacagcaagacagtatctcatgtgatattgtccctataatctaatttctataatttaatggaacttatggcctgtacatggtttactcctgtaatcccagcactttgggaggtcgaggtgggaggattgcttgagttcaggagttcaagaccagcctgggcaacatagtaaaaccccatctctacaaaaagaaggaagttagcgagcatggtggtgcatgcttgtagtcccagctacttcagagactgagcctgggaggtcgaggctgtggtaagctgtgtttgcaccttggcagtccacctgggcaacagagtgaaaccctgtctcaggtgggggttggagggagacagtaatggggctgggcgtgatggtggctcatgcctgtaatctgagcaatttgagaggctgaggtgggcggatcacttgccaaggagtttgagatcagcatgggcaacgtggcaaaacgctgtctctaaaaaaatacaaaaattacctgggcgtggtggcatgtgcctgtagtctcagctacctgggaagctgatgtgggaggatctcttgagcccaggaggccaaggttgcaatgagtagagattgtgccactgcactccagcctgggtgacagagcaagaacctgtctcaaaaaaattaaaaaggaaaaaaagaaaagtaatggaactcagtatttggtaagcagtgtaactgtggtagaatttttttttttttttaaagcttaggaattacatctgaaagtcttttaaaaagtataatattctacttagaaattcagggtcatttggaatgcattggtaccagaaaaagtttttgttttccttttctcatttctccctccagcttttttgaggtataattgacaataaaattgtgtatatttaaggtatatgacatggtgatttgatacatgtttatattgtgaaacttaccgtaaccaagttagctaacacgtgtatcaccttacgtagttaccaattttttttatgtttgtgtgtgtgagagagaacattaggatgtactctcttagcaaattgcaggtatacagtatagtattactagctatagttaattatgctgtacattagatttccagaaatttttcatcttatacttgaaggttggtaccctttaactgacatccccccatttccccctacctttagctctggtaaccaccattctactctctgcttttatgagttcaactgttttagatttcattcgtaagtgaaatcatacagcatttgtttttctctttctcacttcacttagcataatgcgcttcagaatcatccaatgtgtagcaaatggcaggatttccttccttttttaaatgggtgaataatattccattttattgatatatacacacactgaattttctttattcatttataggtgtatgggcacttaggtcatttctatatcttggctgttgtgaataatgctgcagttaacatggagtgcagttatctctttgatattctgatttccattcctttggatatagacccagaagtagcattgctaaaacaatgttctagttttaattttttgaggagcctccatattggtttccttagtggctctaccagtttacattccccacaagaattgcacagggcacccttttctccacatcctcaccaatacttttctcttgtccttttcataatggccatccagtatctctttatggtttggatttgcagttccctgatgatagtaatgttgaacatttttttcatgtacgtgttggccatttgtatttcttttttggaaaaatgtgtattcagggctcttaccaattttttaaattttagaaacagagtcgtggtctttttttcaggctggactgaagtggcgcgatcatagcccattgcagccaactcctgggcttaaggaatcatcttgcctcagcctcccaagtagttaggactacaggtgcatgccaccacacccagctaattaaaaaatgtttttttgtggagatgcggtctcattatgttgcctaggctggtctcaaacttctggcttcatgcagtcctccgccttggtgtcctagagcactgggattgcaggcatgagccaccatgttcagtgtaggccattttaaaatcaaattatgtggggtttttttttttgctattgagttatataagctgcttatatattttgggtattaagcccttattagatgtatggtttgtaaatgttttcttccattccatagattgtcttttcattttgttgattggttcctttgttatgcaggtttttagttttatgtagttttatttgtttatttttgcttttgttgcacatgcttttggtgtcacatccaaaaaatccttgccgagaaaaatgtcaaggagatttttccatatgttttcttctaggagttttatggtttcagggtacaatgtttaagccttactgtggtcttgaatttttgtctttagcttcagaaggcaaaaagctcttctggaattttgccagcttgtttttctgagtgtacagagggaaattacttcctactgatgaggaaaagcaggcagaagttgctgttacagaacaagagatggagagaaggaacttttaggtgagaggtggaaaaggtgtgttcttagctgagatggagagcatgaggtgatacagcaatacatattaactctgtacttaacacactgactacttgagccattctgactgctcaacggaattttgacacatacttgagttaggtaagcaaagaaccataggtttcttttatttatttaaatcttttatacagatatttgtaaaatctgatgtttatatgtgagagccatttgtgaagatactgtatttaactatttacacaaagatcttttgtgtttttgagttgaactttaaaagtaattaaatgagttaacttgaatagaatttctgaagagcttctgcctataatattgattttggctttgacataattgatacttacctattctgacagtgataggctaacagattcagtcccttattgcttgagtcactttttggaacatgataatagcatcatgtcaccttagtggaagatgctcatcttttatttatttatttttctatagtggatgagggcctttcgtttaagagctacaatgatttgatgtttaaaaaagagggtggtttgaacatagccctgcttaattttaaggagtgcatttgcttatcaaaagatcatttcagtcattttgatttttatagtattttggcaaaggcttaaaaggatcattgaaagtcctgacttcatactatttttatagagcttggttcatagatggtgtatatcttaaaaaatcttagaattcttagcatgtttattattttaaaattttggcgaaactgcataggtcagttgtatcttagaatagataaaagcctccctatttttcttaacaagttctagattagacaactcagactaagtttttttgtacttcgtttcattctacagggtatccgtggtgactaataataataacagttaacattactgagtgcttactatgagtcgggtacatgatcttacataattcttacattaatcgtatgatgtaggtactaccattacctatgttttgctgtcgagaaaatgttggaagagttaagtatcttaccaaaatttaacattctgggagacagaggtagactgcaaaccctaggaagtcttacctttgctccctaatctctacagagggaaatgcaaattagaataagtgtcccaagtggaagagaaagaacattttactgttcgtatctttaggttacacagctattatagctggaccgtgagtttgactctgaattttctatagcaaaaaaataaaaaataaaaaacaaaaaaaggaaaaggaaaaaaaaaaaaggtggggaggacaaaagagttagaatagcacacataaaacctatttcttaggaattctcaaaatccctgtgcgagccacaaaaggagtctctgggagatttgggatgatttcttcaacatcattcctatatcatgtgactttgagtttttaatgggactgcctcttttgatcccacaaagaaattttagaatataatgccaaagcatcatttggtaagaattctgtgagagatcatgatgatgtggcccaagtatgcatggtttggtatgattcatacataaaatccagataacttaggagaatgaaatggatggcctgtacatttgccagtcaatccttggttttgtatatacttcagaaatcaaatgagcagataatatatttaagatctttgctttgaaattgaaaacaagaaacattgtagtaattgtattcatattattaagcttgcaagtgaatgggtaattatttccaggttaagtgattgtcttacaagtgaagagagtcaatttttcagtcctgtgaaatgcagcatagagatgccaagttagatatagactgaaaagtgttcactacatttccagacaagtcttgtgtattttagtagtaatagcgtcagtagagtattgcagagttgtgagtgcaaggtgagaaagcggcaaacctctctgtgtagaaatgtctttgtagaagcaaattgcaaagggaagaaggaaaggaccagatgtgggaggaggatttttgtttaaggaattgaagaggcttcagactgattatatgctatgaagaaggaacgaatggagaaggaagaattgaagattagaaaagcagtaatgattgatgctgcaaggtgagtatggttgaacttgaaggggatggaattcagatcattgagggtggcaagtggatcatctctactgagaagttagggtgtctttctcacttcagttccctcaccctccccacatggtagtgtggtttagcttagaaaaagtgactgaagttaggatgtgaatgaagcatgcataaccagactggagaggtgactgggaccagcaagcagctgttctatcctgaactctaaataaggcctgctgaagggggactaggggtaaaacatggaataagctaaagaacaacagagaaaccatgaattttagtgaaaataaaatgaatccccttttgccatatctcctccagtgcataggctcactgcctcagaggttccttatccaagaatgcatgtggttgaggccacagggaaccattggtaaggatttctctctcacataggaagcttgttttaggtgggcagtacatttgaaacccacttggaggtctgtctaatgttgacagtggggtgttaaagtctcccattgttattgtgtgggagtctaagtctctttgtaggtctctaaggacttgctttatgaatctgggtgctcctgtgttgggtgcatatatatgtaggatagttagctcttcttgttgaattgatccctttaccattatgtaatggccttctttgtctcttttgatctttgttggtttaaagtctgttttatcagagactaggattgcaacccctgcgtttttttgttttccatttgcttggtagatcttcctccatccttttattttgagcctatgtgtgtgtctgcacgtgagatgggttccctgaatacagcacactgatgggtcttgactctgtatccaatttgccagtctgtgtcttttaatttgagcatttagtccatttacctttaaagttaatattgttatgtgtgaatttgatcctgtcattatgatgttagttggttattttgctcattagttgatgcagtttcttcctagcctcgatggtctttacaatttggcatgattttgcagtggctggtgccagttgttcctttccatgtttagcgcttccttcaggagctcttttagggcaggcctggtggtgacaaaatctctcagcatttgcttgtctgtaaaggattttatttctccttcacttatgaagcttagtttggctggatatgaaattctaggttgaaaattctttaagaatgttgaatattggccccccctctcttctggcttgtagagtttctgccgagagatcagctgttagtctgatgggcttccctttgtgggtaacctgacctttctctctggctgcccttaacattttttccttcatttcaactttgctgaatctgacaattatgtgtcttggagttgctcttctcgaggagtatctttcagaaagttaagaaggatacccaggaattgaactcagctccacaccaagcagacgtaatagacatctacagaactctccaccccaaatcaacagaatatacattcttttcagcagcacaccacacctactccaaaactgaccacataggtggaagtaaagttctcctcagcaaatgtaaaagaacagaaattataacaaactgtctctcagaccacagtgcaatcaaactagaactcaggattaagaaactcactcaaaaccatgcaactacatggaaactgaacaacctgctcctgaatgactactgggtacataacgaaatgaaggcagaaataaagatgttctttgaaaccactgagaacaaagacacaacataccagaatctctgggacacattcaaagcagtgtgtagagggaaatttatagcactaaatgcccacaagagaaagcaggaaagatccaaaattgacaccctaacgtcacaattaaaagaactagaaaagcaagagcaaacacattcaaaagctagcagaaggcaagaaataactaaaatcagagcagaactgaaggaaatagagacacaaaaaacccttcaaaaaataaatgaatccaggagctggttttttgaaaggatcaacaaaattgatagaccgctagcaagactaataaagaagaaaagagagaagaatcaagtagacgcaataaaaaatgataaaggggatgtcaccactgatcccacagaaatacagactaccatcagagaatactacaagcacctctacagaaataaactaaaaaatctagaagaaatggataaattcctcgacacatacaccatcccaagactaaaccaggaagaagttgaatctctgaatagaccaataacagactctgaaattgtggcaataatcaatagcttaccaaccaaaaagagtccaggaccagatggattcacagccgaattctaccagaggtacaaggaggaactggtaccattccttctgaaactattccaatcaatagaaaaagagggaatcctccctaactcattttataaggccagcatcatcctgataccaaagcctggcagagacacaaccaaaaaagagaattttagaccaatatccttgatgaacattgatgcaaaaatcctcaataaaatactggcaaaccgaatccagcagcacatcaaaaagcttatccaccatgatcaagtgggcttcatccctgggatgcaaggctggttcaatatatgcaaatcaataaacgtaatccagcatataaacagaaccaaagacaaaaaccacatgattatctcaacagatgcagaaaaggcctttgacaaaattcaacaactcttcatgctaaaaactctcaataaattaggtattgatgggacgtatctcaaaataataagagctatctatgacaaacccacaggcaatatcatactgaatgggcaaaaactggaagcattccctttgagaactggcacaagacaggttttccctctctcaccactcctattcaacatagtgttggaagttctggccagggcaattaggcaggagaaggaaataaagggtattcaattaggaaaagaggaagtcaaattgtccctgtttgcagatgacatgattgtatatctagaaaaccccattgtctcagcccaaaatctccttaagctgataagcagcttcaacaaagtctcaggatacaaaatcaatgtacaaaaatcacaagcattcttatacaccagtaacagacaaacagccaaatcatgagtgaactcccattcacaattgcttcaaagagaaaaaaatacctaggaatccaacttacaagggatgtgaaggacctcttcaaggagaaccacaaaccactgctcaatgaaataaaagaggatacaaagaaatggaagaacattccatgctcatgggtaggaagaatcaatatcgtgaaaatggccatactgcccaaggtaatttatagattcaatgccatccccatcaagctaccaatgagtttcttcacagaattggaaaaaactactttaaagttcatatggaaccaaaaaagagcccgcattgccaagtcaatcctaagccaaaagaacgaagctggaggcatcacgctacctgacttcaaactatactacaaggctacagtaaccaaaacagcatggtactggtaccgaaacagagatatagatcaatggaacagaacagagccctgagaaataacgccacatatctacaaccatctgatctttgacaaacctgacaaaaacaagcaatggggaaaggattccctatttaataaatggtgctgggaaaactggctagccatatgtagaaagctgaaactggatcccttccttacaccttatacaaaaattaattcaagatggattagagacttaaacgttagacctaaaaccataaaaaccctagaagaaaacctaggcattactgttcaggacataggcatgggcaaggacttcatgtctaaaacaccaaaagcatggcaacaaaagccaaaactgaaaaatgggatctaattaaactaaagaacttctgcacagcaaaagaaactaccatcagagtgaacaggcaacctacaaaatgggagaaaattttcacaacctactcatctgacaaagggctaatatccagaatctacaatgaactcaaaaaatttacaagagaaaaaacaaacccgcttggagttggcgtgtagcgttaaaagctaaactccaaaggcttttggggctctattgctcttggggacacattgaaataaagaaatgtagagggcactcagagactggactgtgttagctgggaaggatcacagtctgccaggaaatcagttctcaccttccaatgggacaggatttgagggtgggagttggggtaggagaaagggagcagagaggaaaaatttgtaactgtcatgcaaaaggccagttaagagaatctcaactactctgggcaccaaagagcagcttttagtagatagttgagttggagccgggagcagcagcatcaacaacagcaacagctgaaatagcttgtgcaggacattagagctcttcatgggtagagtgcaggaaggccatgacaatggaagcagtaatagaaatcatacagggaggaaaatgatgtgcagcttaatatggtgagatgcccagtagaaaaaggggaaaaatgtttattctgtttataagggaataacatgtttctcagccgtagcagccccaggggctaagaatcaagaaatagggatcaaaacaataccaggaatttgaaattccttgaaaatcttggtttagagtcccttctgtataactgtgctgaccccagaaatgccttgtcctggtgcaggccccgagtagctcatccatttcctgtctggctaccaccccagcagcaatgagctaggcaggtccctgcctctgggtccttgactgtggtcaagactctttccacccccctcctcctttttttttttttttttttttgcctctccagtggatgaatttgctccttttgtgtagtgggctctccctgtcacaagatgtccctcatctaaggtgagggtcaggaatccttatttcctgatgctactcctagtctactgttctgtggtagaattgcctttgggtgccatgcatgtgctgcgatggtgtattttgtgcacaaagggcttggctgatcttgtcttttgccgttcctgcactcttttgtatgagagccccacgggcctgggttattctgtacctcaggtaggaacctggaaccaaggcttggagttaggggaaacactcgttctggctcacagataaaccctggggccctgcagggctcgttctgttctccttctccccaagtggttctggtattctggccctgaggaagtatagagtacatacagagaagcagacagggtaggttctgatacaggtaccaactgagtgtttcggtctctgaagctttcagtcttttaacttgccaaaaaagaaggaaatggtttgactgaatgggttattactggcatctgatatttctagcttcctgtgtgagaaagtgctctgtcaggtctgatttgtgtggatttttgttactagttacaatgtttaacagtttcaggaattcatttaacacactctcttaggtgtgcaattgtttttctcagggaaatctagtgtttaattacaagtctcagattaagaacgataattgtctaacatttatgaaatcctgctgacaactaagtttatactccatttgttaacaggctgttcctgattcgatctgcttgcatctcttctaacttgtgagtgacttggaaggagcagacttcatcttacttctattcatttctcaattaactatgactaacatacactaggcacccaaaaagttaagatgatagcagtaatgaagagaaatggaccttgagtttcagaaacttgtattctaatggaccttcaaaagatggcaagtattgtgtctggaattggtgggttcttggtctcgctgacttcaagaatgaagccacggaccctcgcggtgagtgttacagttcttaaagatggtgtgtctagagtttgttccttcagatgttcagatgtttctggagtttcttccttctggtgggtttgtggtcttgctggcttcaggagtgaagctacagaccttcacggtgagtgttgcagctcataaaggtggcgcggacccaaagaatgagcagcagcaagatttattgcaaagagccaaagaacaaagcttccacagcgtggtaaggggacccgagtgggttgctgccgctggctcgggcagcctgcttttattcccttatctgaccccacccacagcctactgattggcccattttatggagagctgattggtccattttacagagagctgattggtccattttgacagggtgttgattggtgcgtttacaatccctgagctagacacagagtgctgattggtgtatttacaatcctctagctagatgtaaaagttctccaagtcctcactagattaactagacacagagcactgattggtgtgtttacaaaccttgagatagacacagggtgctaattggtgtatttacaatcctttagctagacataaaggttctccaagcccccaccagattagctagatacagagtgctcattggtgcatccacgaaccctgagctagacacagagtgctgattggtgcatatacagtcctccagctagacataaaagttctccaagtcgtcacctgactcaggagcccagctggcttcgcctagtggatcccgcgccagggccgtgggtggagctgcccaccagtcccgcacggcgcctgcacttctcagcccttgggcagtcaatgggactgggtgccgtggagcagggggtgatgcctgttggggaggctcggtccatgctggagcccaccgccagggggctcggccatggcgggctgcaggtcccgagccctgccccgcggggaggtggctgaggcctggcgagagttcgagtgtggcacgggcagtctggcactgctgggggatccggcgctccctggcctgggtgctaagtccctcactgcccggggccggccggcttctctgagtgtggggcctgccaagcccacgcccacccagaactttcactggcccaagagcaacgcacgcagcccgggttcccacccgtgcctctccttccacacctccccgcaagcagagggggctggctccatacttggccagcccagagaggggctcccacagtgcagcagcggactgatgggctcctcaagggtggccagagcagacgccaaggccgaggaggcgctgagagcgagcgagggccgccagcacgttgtcacctctcagtatgagtgtgttgtagtgtatgtgtgaaagggagttttgcaatgggagtatgggatgatgtgttagtcatagttctacagagaaatagactatctatctatctatatctcagagagagagagagagagagattgagtgtaaggaattggctcatgcaattatggagaccaagtgccaagatatggagacggcaagctggagactcaggagagctgtggcgtagtagtttctgtccaagtccagaggcctgagaaccaggagagccagtagtataagttctagtctgaaagctggcaggcccaagaccaagaagagcccaagtttcagtttgagtcccgaagcaggaaaagactgatattccatttcaagcagtcagacaagtcttatggcagggtcagccttttagttctcttcaggccatcaactgattggataagggcgactcacattagggagggcaatttgcttccaattcagctgtttatctcatcaaaaaacaccctcacagacacacttggaataatgtttgaccaaatgtctggacactttgtgccccagtcaagttgacacataaaattaatcatcacagatggtttacacttctaaaacaattttatatagtaagaagcaatatagtaaattctcacaaaagttgttgatagtttctttgaaactgcaactttaagagaaatgatggggccgggcgcagtggctcacgcctgtaatcccagcactttgggaggccgaggtgggcggatcacgaggtcaggagatcgagaccatggtgaaaccccgtctctactaaaaatacaaaaaaaaaattagccgggcgtgatggcggacgcctgtagtcccagctacttgggaggctgaggcaggagaatggtgtgaacccaggaggtggagcttgcagtgagccgagattgcgccactgcactccagcctgggcgacagagcgagactccgtctcaaaaaaaaaaaaaagagagagaaatgatgtacagcaggtccttgaatgacattgttataacactgatgagaaaaaaaaattggtttcattatatatggttttgcttaaagtcatagtttccaggaacctatcagtgacattattgtatacttttaaagcatcatgaaataactgaataagaacttgtaaattgctgaattatgaatcattctcctggtttccagtattatttttattagaagttgacatggtacatgctggttaaaatatgacccaggctggttcaagtgcagtgtggtgtttacaaccaactgatcacagccagttacagatttctttgttccttttctactcccactgcttcacttgactagccatatatgtatgcgtgtatgtatatatgtaataaagtgtgatccagatgttaacaaacttgattcttcttactgactgaatcattattgttcagaaaccctttgatacaatgggaaaaaaaatgctgttgatataagaagggagtcaaatattacaggactggactgttgattaaaaaattatttttaaagcacagtagctatgaattactgtgctgttgtatttgtctctatatgtgttgctgatttctgatcttggatcatgtttaaaaccagtggcagtctgtaaataccaacaattattatcttttgatacccttttaagttatgaaactcatattgttgaagaaatacctggattcattaagaaaatgatttttttccctctttctttcccctcttcttcttctctcttcctttcccgacccccttcctttcctggaaggtctttctgttatatgaacagagtgacgagtccctctctgttgcccactgtgttgcggcaggctgcagtgcagtggcaaggtcacggttcactgcatcctagctcagcagatcctcctatctccgtctcccaagtacctgggactgtaggcgcgcaccaccatgcctggctaatttttttttttgtattttttatagagatggagtttctccatgttgcccaggctggtcttgaactcctgggctaaagtgatcttcctgcctcagaggcacctcccaaagtgctgggattacaggtatgagccatcgcgcccagcctaagaaactgattttcagtgactgtattccttcatatgtgtgttccacaatttaatcctagaattctttggtttttaaaataatgatacactggatattatttgtaaatattctgagtagctcttattatttctttacagcaaatgctgtgtaggtaataaatggagtgatgtcaaatagtatcccttttttttgaagagttttgataaatattgcctaattgcccttatttattcactcatataaaatcaataataattacagctaacttgtttagagtgctggtcaggacctgagctgtatgtggactgttcaatgtaatcctcaaaataactttttgaggaagttgttatcaatgtccttatcaggaaatatctgagtgcctactgtgtgtaaagcgttgtgttaggcagggggactgcagtaatgagcaaccaaccattgttgatgcccacattctagaggatgtgcttaacaattactgtcagttaatttaattgcgttgtgggaaaggctgtgaaagagaaatttgggctgctttgaaagtatatcacacagggtgagagaagcggtgctaagagagaaattatctttgtataaacatctcggtagcctaggtggagtagccaaggtaaaaggacgtgttttaggcagaggcggcagcatgtgtgaaggcactgaggtgctaaacggtggacatgtcccggaagctgaaatagaccaattgtgcctggaatactgaggtgttacagtagattgactcaagataaggctgggcctagatcaaatcctgcattgtgtttctggccacctgaaggatttagtccttcctaagagcaatgggaagcctttgaagtgtttttagggaggacccgtaagatgatttatattttaaaaagaatgacttacctgctttgtggacagtgggtttgtaaagtatgaaattttctattgctctatagtttcagcagtcttattctcagttttataggtagaggtgcttaaaatttttaattaaaaagaaacaaaacttaaaaagaaatccatgatcataggctgggagggagagttgaaagaggtggcttgggaggagaaggaaagaatgattagaaacttagaagtcagagaacacccaacttttttttttgtcacagtgtttggaaaacttaagtttgtatttgaaatagaatatatgttgcccagcagatcccgattcattaaaaatttgaatttgagcttctctctatcatgataatgcttgcctccatgtcatctgatttccagagactacgtatctgagaggatgtcacttaagggctttaactgaatgataccaggggctttgcagattgataaggcatggtgtggggaagaaaagtagagacaagcctatttaaaaaaaatttctatgtctttttatctggcttgtgatgccagtgaaagtaaggtggctatctggcatgtacacagattggttgttggagagccttcatgattttccattattcatttccttcagacagctcctttagtaacttaggtacatcctaccttcccccaccaagacacaatcagtaaactgattagaattatagttttatggaaaaaatacacttcatttattctaatttttgattttaaattttagttttaagaaacaaaccttttaaagttgaatactagaaaactaaaattgtgctgctcttaagttaaacatttttgactgaaaaattctaatatataaactaaggaggggttaatttacgttagcatagaactccctttcatttaccttctttgaatccttccatgtcttcagaagggaaaaaagctagaaagtttgtaaaatattaatatgctttataatgctttctacctgctaaaatgtatgaatcttagagtgagatcctgatgcagacttgtgtgttcaaaggatcatgctattttttcctttgtacttagaattaagcttgagtgcagcaaatgtataaaatcacaagtagagtgtgggttgtgttttgaagtctttaataattattttctattttataaaaaataaaatagaaagttattcaagatatttcaggatactattttatattgtgagcatttgtactttttgtgaaattttatttttctaatgttgattgtgatttgagactattatataaacaaagattgacaaagacaaagttgcaatttttcatagtattaatattttagcagaataatttttgtacttgcttaaggaagaggaaaaactttttttatttttctctcattctttaaaaacaaaaacaaaaaaatgtgagctaatgtaagcagtttcagttttctaggaaaacaaaggctttcgtgtacatgcttctgatagtagacggtgtgaccatatcatgtatgcgttcttaataatgtctgacattatcagattgattaactcagcatagaacctaatcagatttaactatggttggcagctgtacactagaagaatagtaatatagtgggagaataaaatcagttttttaagaagctgcattaaatacaaaactaaaaaaaattaaaagtgttcattatctcacagtgacatataaagctattgtgttcacacagtggctttcttaaatccatgctgacttatattttcaaagatcggctactgccagatgctagacatgctgataataagattttcatttgataatttgatggtgtaggtttcaggcagttatgatttcctgcaggcttcaagggtcaacgtttgtatctacatactgtgtttactgtgtaaacctcatagactatctaactctaagaactagagccaaaaccactgcttactttttctgggatcaacgtaagtatttctctaagaaataggtcattgcaaagtaatcatttctcctttgttttttaaaaaacgtaatcatgaaaagttaataaatgataagaaagagtcctaaattagggggctataaattaattttaattcttccattaactgtaacctgggccttaggatttaattagattcagtcactaaatgtttagtgaatgcttactatgtgaaggctgttctgggctctaaggctatgttagtgacccaaacagtaaagatattggtgccattcaaagcacttttttgatgtgctgagaatccctattgaggataacagtcaatagttaattacataagctttgaggactgatttctagactagtgagaaatagccatgacaaaaacagtctcacttgcgtaaattatttgcacaatatttttctcttcttgggcgtgatacccattttagtcagtgttctaaagctattaaactaataaaactcaagtgaatagtcaaatatccagtcggcttttatgatttgggattaaagtaacaaaaatagctgataaatgagtggaaaaggtatgcaaatagaatggatcaattgttaccttctgggaaaagagaataactgcttttcagagagcaattttctaaatcaacactcatcaaagtatacttagatcccttgcatattaacacataattaagttatgtatgtatgaaaaacagtatttattaagtttttcctattacttaagatttctaatttaattaagtacaccgtcatctctgactagtttacttaatccagaaaattaagaaatatatttaattcaggaaaaaggaacaattgctgccattttatggtatattaaccccaacaggtcttcattgtaagacaatataatttctgaaggtttggtaagtgcttgaagttttgaaattagataactttctttaaactctagtcttgcataagagtaaaaatattacagattccagaagagttactttgaggagttttaaatgccagcaaggaggtgcttataataaacatatctatttaactatcattgtagctttattttaatgtataatatatctgggatatgttgtgggtccacagaagtatttgttgaattgaattaaatgtatgcttcctaaatgtacctttcaaaacgtattgagcaatcatgtaactacattaaattataaactaataaaatgatcagtattaatgaaatttgaaaccaatttagaataataaaaagaattgattcatggtagaattcagcaatacattttgcataagcacattatgaaaacctaagtttccaaacctcggcagtaaaaaaccagtcatagcaaattattagatgtgatttatgacttattgatagcattaggatagcagtcacatgttcattttccagttttttttaataatttgataattttaaaaggatactaaattatcccttctttactgttcttagaatttatgttcattttactgatgaggtcttgagtcatcgtgtaatgttttaaaggtaaaaagttgggtagaataatcttaccatgtaacttattttttgttgttgtaataaacatggttttaaaacagttgtcactgtttataattgtatcattcattaattttcaggtaataaatggacagatttggcttagtagttgaggcgtgatttcagggactgcttaccctgctttcttcagtatgttaaaaaatgaatgtgagatctaccggaggaaggagaaaggaaaaaaacctttattttccaagttagcaatctgcagttttgggaaacctagcttctggggaaactgaaagcacacgcttggctgaagggagggaaatagcagcatttaagccttccagggtctgtcttacatattcatcagatttggggaatgtctgtgaatgtttacagggaaagtcaaatgcatgtccagatataacattaatataacatacattctatattcactttggggtggggttttaacattaaaatgaggaggaatttggttctttgcatcaaaaggtgaactataagggacaaagatgttttatgtgccatctctgtaagccagttggaaccagcttagggtctatagctgcttatcaggagagaatatttgtaaagctggtgttttctctaatcagtgctgttggctggacccccaaggtgggggtgttcttgttagctagtgtcatgtggtctaccagagtcagttggataatgttttcctagaatgagcttctgcttaactgcaggaagaaaaccttatggcaatgaacaaaccttatagtagttaacagtgtaggcatacatgaccaaactcttttccctgctctggccacttaattttctctgagggtctcatcttagccacagagcccatcttgtctgtcatctaggggtacattgttgacagttacctttgttaccattcaccaatgcttaagatcaattaatagtagacattgtctctcattcacctattaggccatacattcaaataagcatgggagagaaaacacatttgacttattaccacggtaaggttcaaattactgatatcacattcttttttgaggaagcttttatagagaagaaacactgtgggttaggatgggagttgtagcaaaggtaggctgtgggtaccaaagataactaacctataataacctattttggggaagtgtttttattaacccttttatttgtgactcttttttggtattcagaattgcaccccttagtgtaatttttagtggtgagagtcttaagagtactagtattctttgggaaacaaatgttgcacatatggcatcatctttcttcctcctacagagaagtgttgacatggatcaggatcacactggtgccactttaactggaaagttttgagggattgtgaatggtgctagaggtggccacacaatctttttggtccttctttgttcacattttgccttcttttttcccatccgtggctggcagttgacagtgttgaggttgtcctttacttgggaagcctgttgacccaacagcaaccctgatgacccagttgtcttactcactcagaaatggtgccttcttttggtggcatttgccataattgtcctaataactgtgcttgtcacaaaacccaatgcttgggctcagtaaatatttattgactaaaggaatgagtactggagactagcctctatgtttcttactcacttctgtttttactgattctgcttttttccatgaatgttgccttctctcgtgtttcacattcagaattttcttagagaatatcttagtttgggctgctgtaacagaataagtctgggtggcttaaacagcatttatttctcacaactcaggagattgggaagtccaagatcaaagtgctggcagacctggtgtctggtgagagcactgttcctagtttgcagacagtcttctcattgtatcctcacttgctggagaaagaaagaccttgtgtctcttcttttataatagcactaatcccatcgtcagggacccaccctcatgacctaatataacctcagttacttccaaatggcctcacctccaaattctgtaacactggggacttgagttgcaatatatgaattttagggagacaaatattcagtcaatagcagaggtaacacttacgttagtgaggaagaatttttaaagatttcatgtttgttttagatataactacttaaaatacatgggaatgtttctgtaatataaaaaaatgccattgtagttccatattcataaagtgaaacactttataaagaaataacgtggctgggcactgtggcttatgcctgtaataccagcattttgagaggctgagacgaaggattgcttgaagccagaagtttgagaccagcctgggcagcaaagcaagaacttgtctctacaaaaaataaaataaaataaattagttgggcccagtggcatgtgcctgtagtcccaactattctgagaggctgaggtgggaggattgcctgagcccaggagttgtaggctgcagtgagctgtgatggcaccactgcattccagcctgggtgacatagcaagatcctgtctgtttaaaaaagaaggagaaggaggagaaacatgtttttcttaaactttctttaatttggttttatgttaatgttaagaataaataaccagtaaataatcttgtaaatagaaaatactatttctgagaatttcattcgcagtaatattagaaatctattacatctcttagaaatatgatatacaaaatagtttgaattattgttattgaagaggatgtatgccagattttcaagagtaggtttattgtttgtttatgaaataaaacatcaactgccatttattaaatactttctttgtgccacaaagagttttgaatgcaatttcagtctagtcctcaaaatcatcctaaaagattggaggattatgtaaattttgcaaatgaaacttggcttttgaaatttggtcacttactctcaaagctttataaccagcaaggggcaagggctgagacttgaactcatctccgtcttattccaaagcccagccctttcgtctcttctgtattaaattcccattcctacatatggatggccacattgcagtgaatacagttggaaaataatatcagtattggagcctctgggaaattttgttttgctacattgcatttatgagctttcatccaggtccttctgtattccctgtatagttggcgctggatgaatgtttattattaatataatgaatacatatagccattcctttaatgacacagtcttacctgctaataaaattgtgtatcagtttctatcttattatgcatgattttccttgctcttctctcagcagattatgatttttaataaaagcaaagcacacacacaaaattcttgtgtcggtagctgataaatttaataggaccttttaggagacaaatactccagcaagtttgtattcactttatctgagttgaaaataaaattgctttgtatgctttagagtaatactacatttgattgtcctgtgccttgtattctgcagtttgacatttagagcttttcgtctttcaggatacaaattctattttgatatgccaacaaaatgatttaaaaactaaattgaagtttaaaaaaatactgtcagtatattgtcaaaaccggagaatatgaagtaaacttggttcaactttttatactagatacacgttacacagaacatgtaacattcttttgtagaagccagagcaaaaatacccacagtgaattaatttggtaatgaactaggttaatttgtagagaaaaggcttaggtcagggtgagatttggaggtataggatatcatagtaacataaacctatcaaaacatgcagaacatggagagcactaaaattcattaaaaaaatcagattgagtgataatataatgataactttaggaaattgatagaaactaaacttgagccccagtgactccagagatagtctttaaactgttcaggacagctagaacaggttggttttctgattaaaattcttatctaaggagaagttgataaatgctaccttcctgcacttgctcctgtaagttcaggttagtaggtgatgtcccaaagtgccctgaaggcaaccagtaaaaaactttttttttttcatgtagaaaatttggaacttggtgactctacagatgaaattcaggctctgaaaagtgctcacttgctctcaaaatttataatgagcaaggagggaagacttgaagcgtgaacccacttacatattactctaaaactcatgctatttcctctgtattgtgtgagatcaaaacaaatgccatatcatacacgtatgcaagctttcagaaatttaggtcggtggttctctgaccaagcacagtggttcacgcctgtaatcccagcactttgggaggccgaggtgggatcgcttgagctcaggagttcgagcctgagcaacgtagtgaggccctatctctacagaaaattttaaaattagctgggcatggtggcacacacttatagtctcagcagatgtgtgccaccacactcagcgaataattttgtattagctggtggaggatcgcttgagcccgggaaatcaaggatgcagtgagccatgatcacagcactgcaatccagcctgggtgacagagcaagaccctgtctcaaaacaaaacaaaacaaagccttctcaaaagtgtgctctccagaggtcacgtgggaggttgttacaaatgcagattaccaggctccatttcacacccactgacaaagaaacttcggggtggggccaacagtgtttaaaaggccctgtccttgattctgatatgtgcacaagtttgagaaccactgctttagatacttttgcagtttgaaaaagaatatggataagagggcctctgaacaatgtagttgttttcctacatagagcaatttggccatgttaggaataaacccattttgtgagtaattaattatagcttaggtgcagtctaacttaatatttttacttcaattccaatctcctttagggatttttttttaactactaaatttggtcaaaatttgacttgtctccctataatctataatatttctattctagattagccatgttgagggaaataaaatttgggtaaatattgcataatatttatattattgaagagacaattttttaccttaaagagaaggcacagtatttaattttaataaattatatgtgatttttaaaaatgtaaagactctttttggccttatttgagctcataaaatatttggacagttatcatgagagtttgctaaaataacgtaaggtgatcttattctttcccattgttttgactaattgttggtaaagaatctttctttggggagcactccccaaggcaacttggaagtgtgtcctgggccgcagttatcattattattatgattattattttttaaaaaagaatctttgaaatgactggttacttgatggtattaaagaattaatatcatacatgtctgtgtgaggtgggggatgataccttggggatgtttaatgggggagtatttgtcttttaaagaagattctcatttcattcataaattttgttttggtgggtacatagtaggtggtgattatatatatatatttaggaatacaatgtataagatataggtacacaatgtataataatcacatcagagtaaatgtggtatccatcacttgaagcatttatcctttgtgtttcaagtaatccagttgtactccctgaggtctgttctaaatttataattattactgactgtagccaccctgttgttctatcaaatactagatcttattcatttttttttcatttttctatagcttcttgttggaaaaaaaaatatatatatatatatttatatatttacctgttaaccatctccactccccccaccccatgcctcccactactctccctagcttctggtaaccatctttctacgctctgcctctatgaactcaattgtttaatttttagctcctacaaataagtgagaacagacaaaagtttgtctttctttgcctcatttatttcacttaacataatgactttgagttccatccatgttgttgcaaatgactggatcccattcttcttttatggctgaatagtattccgttgtgtatgtgtccattttctttatccacttgtctattgatgaacagttaggttgcttccaaatctttgctatcgtgaatagtgctgcaataaacgtgggaatgcagatatctctttgataaattgattcctttcttttgggtatacttagcagtgggattgctggatcatatggtagcccaatttttaattttttgagcaacctccaaactgttctctgtagtggttgtactaatttatgttcccaccaacagtgtacaaggattttcttttctcagcatcctcctcagcatttgttattgcctgtctttggataaaagtcattttaactggggtgagatgatactttattgtcgttttgatttgaattttgctgatattcagtgatgttgagcactctttcatatggctgtttgccatttgtatgtcttcttttgagagacatctattcagatcttttatcccccaccctgcttttctttttgagacatagctttgtcatccaggcaggtgtgcagtggctctcactgcaacctctgccttttgggttcaagcgattctgtttctcagccactcgaatagctaggaggattacaggcacccaccaccacatctagctaatttatgttattttttagtcaagaggggtttcaccatgtaggcccagctggtctcaaattcttgacttcaagtgatctgcccacctcggcctcccaaagtgctgggattacagaaatgagccactgtggatggcccttttgcccattttaaaattagatgattaagcttttttttatttatagaattgttttagttccttatatattctggtaatcccttgtagagtggatagtttgcagatgtaatctcccattctgtgggttgtctcttcatttgttgactgtttcctttttggtgtagaagctttataatttgatgtgattccatttgcccatttttgctttagtttcttatgctttctgggtattactcaggaaatctttgctcagtccagtgtcctggagagtttcaccaatgttttatttttcatggtataatagtttcattttgatttgagttttgtatatggtgagagataggggtctagtttcagtcttctgcatatggacatccagttttcctagaaccatttattgaagagactgtcctttcttcagtgtatgttcttggcacctttgtcaaaaatgagttcactgtagatgtacaatttgtttctggattctctattttgtttcattggtctgtgtgtctgttttttataccagttcaatggtgttttggttaccagagctctgtagtataatttgaagtcaggtaatatgatttattcagttttgttgcttttgcttagaatagctttggctattcggggtcttttgtggttccatacacattttaggattactttttctgtttctgtggagaatgtcgttggtattttgatagagaatgcatttaatctgtagattgccttcagtagtatggacgttttaacagtattgattcttccaatcaatactgtttttttggtgtgtatgtgtccttttcagtttatttcaccagtgttttgtagtttttattgtagagagctttcacttcttagattaagctaatttgtaggtatttaattttatctgttgctattgtaaatagaattacacttttaatttctttttcagattgtttgctgttggcatatggagatgcttttatagtggtgaaagtgggtatcctttttatgttccagatcttagaggaaagtctttcagtttttccccattcagtatgatactaactgtgggtctgtcatatatagcttttattatgttgaggtgtattccttctgtactcagttttttgatggtttttatcatgaagggatgttgaattttatcaaatgctttttcagcaatgatcatatggtttttgtccttcaatctgttggtattatgtatcacactgattgatttgcatatattgaaccatccttgcatccctgggataaattccacttggccatgataaaatgatcttttaaaatgtgttgttgaatttggttcgctagtattttgttgaagatttttgcattagtgatcattaaggatactggcctgtagtttgcattttttggtgtgcctttatctggttttgacatcagggtgataatggcctcacggaatgaattgggaagtattcccttctcttctcttttttagaacagtttgagtaggattgatagtaattctttaaatgtttgataaaattcggccttgaagccatcaggttctggggttttctttgctaggagactttttattatggatttgatgtcattacttgttactggtctgttcaggttttggatttcttcatggttcaattttggtaggttgtatgtgtctaggaaatcatctgtttcttctaggttttcagatggattggcatatctttgctcatagtgcccctaatgatcctttggatttctgcagtgttggttgtaatgtctctctctttttttttttttttacatctctgattttattcatttgggtgttttctctttttttcttagttcacctggctaaagacttgtcaattttctttctcttttctaaaaacacacagttttgttgctctcgtattttctttattttgatttcatttatttctgctctgatctttataatttcttttcttctactgactttgggtttggtttgctcttgcttttctggttctttaaaatgcatcattaggttgtttatttgaagtttttcttttttgatgcaggcacttggaagtataagcatctgtcttagtactgcttttgctacatcctataggttttgctatgttgtttttccattatcatttgttccaagaaatttttcagtttccttcttaatttcttcattgacccactgagcatatggtttaatttgcatacgtttgtatagttttgaaaattcttctcgttattgagctctagttttattccattctggctagaaaagatacttgacattatttcagttttttaaaatgttttgagacttgttttgtggcctaatatatagtctatccttgggaatgattcatgtgctgaggagaaaaatgtgtattctgcagccgtgggacaaaatgttctgtaaatatctattaggtccattttgtctacagtgctgattaagtctgatttttctttgttgactttctgtctagatgatctgtccagtgctgaaactgggatgttgaagtctccagctattattgtattgggatctatctttctctttagctcaacaatatttgctgtatatatctgggtgctccagttttggctgcacatatatttatgttatatcctcttgctgaattgaccctttatcattatattatgaccttcattgtctctttatagtttttgttttgaaatctattttgtctgtatagctgctcatgctttttagctggtattctttgcacacatatcttacaatgtaaaaaaaaaaacttctctgagcaaaagcaatttgacacttcataacgtctagaaatattttttcaaatgtgatgtatgaataggaagtagcatacaaaaacaaattactgtgctatccctcccccaagaatacatattctctcttcacaccacgtggctgctgctggggcatgggggaggggtggcattggcagttcaagactgtcctaccctcttcagtgactcttttagcaatatgaagttaaaaaccaggtactgttaccactcacctgatgtttaattctcatgaagatgcttttttgtgtagatagttgtcaaatgtgatgttcctgcagggaggacaattggtggaggcttctatttggccaacttgctcctcctcatttgtaaatatttcagtgggtacctgtgatttgctttgaagtacagtaattggagaaagggtaatgagagttaacaaatacggctaaagtggaaacgtggtcagtcttgagctgattattgttgaagctgaatgagggatttataaaggtctgttatgcttttctttctaagagtttgcttgaaatcttttatactttaaagttgagaaaaccaacaatgataccagctcagtacagtactcacacagtgaaggtttgttactttagctggcattctttgcagacataccttataatgtaaagagaaaacttttctaagcaaaagcaatttgacactttgcgacttctagatacaatttttcaaatgtgatggatgaataggaagtagcaaacaaaagcagatgatgaggaaataccgtttaagatgtcactttaaaatactgtactgtgttaccataagtagagtgcatttctagatccttactacattttacacatcttttctgattatgtttcttctttttatacttttaggtatacacattagctgagtactaggaattttaaatgcatgctatttagttttgaacgttcaagtacttagttgaacttaagttatgaaattgtaaaggaatggtgtctaccagtgacattacattaaagcttttcataatcgagttgtggtaagttgttttattttaaatttctaccgtaggaacagaatggttctgtaaaagttatttttcttactgtgatataattaaaaaatatgaccatacttttgcataaagaattgatagactatttctcttacggagcatatatgcatgcaaaattgactaaagaggactcatttaaaacatttctaaggggaaatttgagttaacacaagggtgaatatattttaagccagtttatattttaaaccactcaataatgtggttttgaaaagtgactttttagaatatgtatgtatatgtctacacacacacacatacgcacacatgcaaatgatgtgtttaccctgctaagcagttagattggtaactatgaggtagcagcttctgtatcttgttaccttgttaggtcagtaaagcaagtgagggggcactttattagtttgtggaccattcttgaagctggtgacgctgcaaagggtccaaggcttgccctctctgctagtctagatcactgtttctgagactgtaatgtatgtgtaaatcacctggaggtcttgttaaaagtgtagaccttgttttagagatctgggatggggcctaagattctaacaagctccttaggtgatgccaatgtaggtttgaggacctctcttttttttaatttttatttttttgaactaggggcttgctttgttgcctaggctggtctccaactcttccgttcaagtgatcctcccacttcagcttcctgagtaactgggattataggagaacgtgcccagttaaggaccagctctttgaatagcaaaggacaagcttatcatagttgtgatttagaatttaaaacctcagataaactatggttataggtaatatatttatactaactttaaaaaatatcaaattttattattattattttttggatttaaaaaatgtttctggccaggcgtggtggctctcacctgtaatcccagcagttctggggaggccaaggtgggaggatcgcttcagtccaggagttcaacatcagcctgggcaacatagcaggactgtgtgtctaaaaaaaaaaaaaaaaaaaaaaattagccgggcatggtggcatgtacctgtagcctgtagtctcagctacttgggaggctgaggtgggaagatcgcttgagcctaggagttcaaggctgcagtcagctatgaacaatgcactgccctccagcctgggagacagagcaagaccctgtctttaaaaaaaaaaaacaaaaaacgtgagcctagggctgcttctagcctatagaatatcttttgctgactagatgcagattctccttggggtagatgcatagcttggccagataagggacttctaggtagaaccatgcacaaaaaggtggttgaatttcagaccttactcactggctgcaagcttttgtgcagtatacaaactcacaaattactggttgatcctacctttgtttaacatctgggcacaaagatttaaaagagtaggaaaaaacatttaaaactattgtagtgataacaataaactgcttaaaaggtatataaacaaaacaagaaatctttatctgtcttttcacatgttgtaataataaggcttttgttcacaattttaatgttattttaaaaattaatactgcatttgttactcagtaggtttaataaaatgcagagaccgtatacaagcaacatactgctgactatgttaacttagaaaataaccaccttcacagatttagcagtctagggcagtggttcccaaattcatggtattgggcaaaatgagaaaaataaaacaatgtaatcaggtttttgtatttattaattcattctatttaaggggctttttttttttttttttttttgacagggtcactctgttgcccaggctggagtgcagtggcacgatcttggctcactgcaacctccgtcccctgggttcaagcaattctctcacctcagccttctgagtaactggaattacagatgtgtgccaccatgcccggctaatttttttttttttttttttttttttttgagacagagtctcgctctttggcccaggccagagtgcagtggcacgatctcggctcactgcaggctccacctcctgggttcatgccattctcctgcctcagcctcccgagtagctgggactacaggcgcccgccaccgcacccggctaattttttgtatttttagtagagacggggtttcaccgtgttaaccaggatggtcttgatctcctgacctcgtgattcgctcaccttggcctcccaaagtgctgagattacaggcccagataatttttgtatttttagtagggatggggttttgccgtgttgcctaggctgctcaaactcctcggctcaagcagtcttcttgtgtcagtctcccaaagttctgggattacaggcatgagccacctcatccagcttaagggacaactctatattcattatttttggtgttaaaatgtcgtctttaaaacagtattggtggtatatgagaggtatattcgttatgtacctttctgcagacatacatgcccatgctacttttattcctgaccttatttttttttcagaggaagaagttaagaaattagtttgtgggccattcttgaagccagtgacactacatagggcccaaggcttgctctctctactagcctagatcactgtacctctcagagccccactcacttgtctcctaggtgcctcataaatagttagcaacaattctcagtacttcattaaaattcacctcctcctgggagccctccagcctttgaaataacctgctactggctagagtagcctagtggtgaagagcttgaactagacagccttggctctgccacttaatgcctgtgtggccattacatatcttttacaaggttatgtaacctgtttgtgcctctttttgttcgcagttaaaatcaggataattggctgggcacagtggctcactcctgtaatcccagcactttgggaggctgaggtgggtggatcacctggggtcaggggtttgagaccagcctgaccaacatggtgaaaccccgtctctactaaaaatacaaaattagccgtacgtggtgacacatgcctgtaatcccagctacttgagaggctgaggcaggagaatcgcttgaacctgggaggtggagattgcagtgagccaagattgcaccattgcactccagcctgggcaacaagagcgaaactccgtctcaaaaaaatcaggataattatgtatcctttttgtggtggtggttgtgattattaaatatttggcacagtgccagtcacataataagcactcagctgcttcatcaatatcatcctaacgttagtcgttgtgtggacagcaacagattaagtaaaaagttatacccctaccccaattctgtttcagtctttctgtgtttggcgaacttcccaggtgattcttacatttaatacatgtgaaaaccattaccctaaaggtcctttcatagtgaacttcatttaggacttgccaaagccactaacatgaaggagttgagatcaaattcattttgtctaacactatatctcaaatgcataatattgtgtctggcatatagtaggcattcagtaaatagttgtttaatgtgtgtagcccaacttcatagttttatgagataatacggtcttacgttaaaaaaatgagagcaaacattggttctagttatgttatggagaccttaatggggaattcactgaagtataagaattaattctctatgattattctccctatggcttattagaaaaagattgaatgagctattattaaaatcataatatgtatctttcctctagagtaagactaataactgtcatagcaggctcttctccatttatttcgtctttagaaccatcttttttaattttatttaaaagtaaggtaggagatatactttcatttttcttattctctggcataaactttgttttttaaattcagctttagccaggtgcattggtgtgcaccagtattcccagctttttgggaggctgagtcgagaggattcctcaagcccaggagtttaagtccaacctgcacagcatagcgagctctttgtctctttaaaataaatataatacattcaactttagaagtcatacagtactgtttcttttgaattgagaaatagttcttaggcaatgaggatgctcctaactataaaaaagaaacatgttttgtttaccttgaataatttactaggacactgaataaaaatgttaagaaactaattccgcaagaataattgtgtagttatctgatttctgagtgaagcattttcagctagataattctagaagaaaatatttaaataaccttggcagaactttaacgttattcataacaaagatagataaaaagcaattctcacctagccataataataaatcagtatgtgcagttaaactaggaaaaacactaatatttattatatgctttttcctaatgtatcttgtatatatggtcagttagttttataagaggaggttatttgacattagttttcttgctgggaaaacctgatttccagttggtgtgatgttttaccttccttgattacaatcttattctaccagaaatgaaaagataatcaagacgtggctcatctgtttccatttatcttgatcatctatgtagtaagtgcagcgtttagattatttgtatctttttatttttatctttagatttttatctttattagtttttttattagattattttattagatattttattagatatttttgtatctttagattattttatttattattttaaataaatataatatttatttaaatataatatttatataatatattataaaataaataatatattttaaagattttgtatctttagattattttattactttattttattagatatttttgtatctttagattatttgtatctttttattttatcattatttgctctaaagatagtctgttcagatttgttatgaccaaaaatataatgatgcaggtaattattgtcttcatccttaaaattactttctaaagccaatcattctgcctaatacagggtcttcatttatttttagctacctgaaactgagtctaaaaccacttctctctacttcctcttgtctttttcatttaaacatgtgtaaattttgcagttaaaaatgataaacctatttacatttagtgttcatctcttcttctgttgttattgctattttccatctctagtccttttcaaaaacacagtggaatggatagtatagatcagctgagattgctttttaaaaggttggcagtgacatcttcatgctaaattctagtgtccattcttgctctctgaaactatctcccttgatttttggagcattgcacttttctccactgctctctgatccttgctttttttgtttatttttttatttttgtttttggctgtctttgctggtttcttttcatgcctcaaagtattttctaaaattaaggccttaatgctatgtttctctgtgttttagggttgcagattcctctaaagagggctgcaagtgacataagggaatgaatggtccaggtgggtacacaattaataagagaacagatctctgtccaacggggacaacaccactgtttgagttcaacttactatcatgtggggaaaaaaatgtttaatgtaatcagatcttctagtgagccaagagaagtatgggaagtccagatttttatgtgaaatatctcagatttcgaatatcggtggctagtggaagtttgggaatacctacacgagagggagtttggagcagtattccggttggaacagggtttatgtagcttgtacgttgcacagcctttggatttgttgtatacattgtaatatgcaccacttgcacttctattaagagtctagggattgccttaaagctggattttcataggaagtgcacatttggtaatttgtatatatattgttgggtagtgccctgaagggaaaggttgatggagggattggagcagatgtcccccaagccaccctttcctgccacaatggttagaaactattttttaaacattgaaatctaaataaacatgaccataggcctctaatatgtggcctctgctctgaatcttgaagagcttatagctctcatagcttcaaacatttctaaatagaagatagagatctaaattctagttccctttcagtaagttttcagctggtgacctggacaaaatcacaattctttgacccttagtaggctgatatttgaattggagacagttctgtttccagttcagctcggggagctttccattctaaaactcatgatcttattgttttaaatctctattttttaactggcctcacactagtttgcatattatatttccagtcacaaaaaaatatttcactactttagtgtttcttttttcttttttttaaattttattattattgtatgttaagttttagggtacatgtgcacgacgtgcaggtttggtacatatgtatacatgtgccatgctggtatgctgcacccattaactcgtcatttaccattaggtatatctcctaatgctatccctctccccaccccacaacaggccccagtgtgtgatgttccccttcctgtgcccatgtgttctcattgttcaattcccacctataactgagaacatgcggtgtttggttttttgtccttgcgatagtttgctgagaattacggtttccagcttcatccatgtccctgcaaaggacatgaactcatccttttttatggctgcatagtattccatggtgtatatgtgccacattttcttaatccagtctgtcattgttggacatttaggttggttccaagtctttgctattgtgaatagtgccgcaataaacatacgtatgcatgtgtcttcatagcagcatgatttataatcctttgggtatatacccagtaatgggatggctgggtcaaatggtatttctagttctagatccctgaggagtcaccaaaccgacttccacaatcgttgaactagtttacagtcccaccaacagtgtaaaagtcttcctatttctccacatcctctccagcacctgttgtttcctgactttttaatgattgccattctaactggtgtgagatggtatctcattgtggttttgatttgcatttctctgatggccggtgatgacgagcactttttcatgtgtttttgggctgcataaatgtcttcttttgagaggtgtctgttcatatccttcacccactttttgatggggttgtttgtttttttcttgtaaatttgtttgagatcattgtagattctggatattagccctttgtcagatgagtaggttgcaaaaattttctcccattctgtaggttgcctgttcactctgatggtagtttcttttgctgtgcagaagctctttagtttaattagatcccatttgtcaattttggcttttgttgccattgcttttggtgttttagacatgaagtccttgcccatgcctatgtcctgaatggtattgcctagcttttcctctagggtttttatggttttaggtctaacgtttaagtctttaatccatcttgaattaatttttgtataaggtgtaaggaagggatgcagtttcagctttctacctatgggtagccagttttcccagcaccatttattaaatagggaatcctttccccattgcttgtttttgtcaggtttgtcaaagatcagacaatgagggctctgttctgttccattggtctatatctctgttttggtaccagtaccatgctgttttggttactgtagccttgtagtatagtttgaagtcaggtagcatgatgcctccagctttgttcttttggcttaggattgacttggtgatgggggctcttttttggttccatatgaactttaaagtagttttttccaattctgtgaaaaaagtcattggtagcttgatggggatggcattgaatctataaattaccttgggcagtatggccattttcacgatattgattcttcctacccatgagtatggaatgttcttccatttctttgtatcctcttttatttccttgagcagtggtttgtagttctccttgaagaggtccttcacatcccttgtaagttggattcctagatattttattctctttgaagcaattgtgaatgggagttcacttatgatttggctctctgtttgtctcttattgctgtataagaatgcttgtgatttttgtacattgaatttgtatcctgagactttgctgaagttgcttatcagcttgaggagattttgggctgagacagcgggattttctagatatacaatcatgtcgtctgcaaacagggacaatttgacttcctcttttcctaattgaatgccctttatttccttctcctgcctaattgccctggccagaacttccaacactatgttgaataggagtggtgagagagggcatccctgtcttgtgccagttttcaaagggaatgcttccagtttttgcccattcagtatgatattggctgtaggtttgtcatagatagctcttattattttgagatacgtcccatcaatacctaatttattgagagcttttagcatgaagagttgttgaattttgtcaaaggccttttctgcatctattgagataatcatgtggtttttgtctttggttctgtttatatgctggattacgtttattgatttgcatatattgaaccagccttgcatcccagggatgaagcccacttgatcatggtggataagctttttgatgtgctgctggattcggtttgccagtattttattgaggatttttgcatcaatgttcatcaaggatattggtctaaaattctcttttttggttgtgtctctgccaggctttggtatcaggatgatgctggcctcataaaatgagttagggaggattccctctttttctattgattggaatagtttcagaaggaatggtactagctcgtctttgtacctctggtagaatttggctgtgaattcatctggtcctggactttttctggttggtaagctattaattattgcttcaatctcagagcctgttattggtctactcagagattcaacttcttcctggtttagtcttgggaggatgtatatgtcagggaattaatccatttcttccagattttctagtttatttgcatagaggtgtttatagtattctctgatggtagtttgtatttctgtgggatcagtgttgatatccccgttatcattttttattgcatctatttgattcttctctcttctttattagtcttgctggcggtctatcaattttgttgatgttttcaaaaaaccagctcctggtttcattaatcttttgaaggtttttttgtgtctctatttccttcagttctgctctgattttagttatttcttgccttctgctagcttttgaatgtgtttgctcttgcttctctagctcttttagttgtgatgttagggtgtcaattttagatctttcctgctttctcttgtgggcatttagtgctataaatttccctctacacactgctttgaatgtgtcccagagattctggtatgttgtgtctttgttctcgttggtttcaaagaacatctttatttctgccttcatttcgttatgtacccagtagtcattcaggagcaggttgttcagtttccatgtagttgcacggttttgagtgagtttcttaatcctgagttctagtttgattgcactgtggtctgagaggcagtttgttgtaatttctgttcttttgcatttgctgaggtgtgctttacttccacctatgtggtcagttttggagtaggtgtggtgtggtgctgaaaagaatgtatactctgttgatttggggtggagagttctgtagatgtctattaggtccacttggtgcagagctgagttcaattcctgggtatccttgttaactttctgtctcgttgatctgtctaatgttgacagtggggtgttaaagtctcccattattagtgtgtgggagtctaagtctctttgtaggtcactcaggacttgctttatgaatctgggtgctcctgtattgggtgcatatatatttaggatagttagctcttcttgttgaattgatccctttaccattatgtaatggccttctttgtctcttttgatctttgctggtttaaagtctgttttatcagagactaggattgcaacccctgccttttttgtcttccatttgcttggtagatcttcctccatccctttgttttgagcctatgtgtgtctctgcacgtgagatgggtttcctgaatacagcacactggtgggtcttgactctttatccaatttgccagtctgtgtcttttaattggagcatttagtccatttacatttaaagttaatattgttatgtgtgaatttgatcctgtcattatgatgttagctggttattttgctcgatagttgatgcagtttcttcctagccttgatggtctttacaatttggcatgtttttgcagtggctggtaccggttgtccctttccatgtttagtgcttccttcaggagctcttttagggcaggcctggtggtgacaaaatctctcagcatttgcttgtctgtaaagtattttatttctccttcacttatgaagcttagtttggctggatatgaaattatgggttgaaaattcatttctttaagaatgttgaatattggtccccactgtcttctggcttgtagagtttctgccgagagatcagctgttagtctgatgggcttccctttgtgggtaacccgacctttctctctggctgcccttaacattttttccttcatttcaactttggtgaatctgacaattatgtgtcttggagttgctcttctcgagaagtatctttgtggtgttctctatatttcctgaatctgaatgttggcctgccttgctagattggggaagttctcctggataatatcctgtagagtgttttcccacttggttccattctccccgtcactttcaggtacaccaatcagacgtagatttggtcttttcacatagtcccatatttcttggaggctttgttcatatctttttattcttttttctctaaacttctcttctcgcttcatttcattcgtttagtcttccatcactgataccctttcttccaactgatcacattggctcctgagtcttctgcatttgtcacgtagctctcatgccttggttttcagctccatcaggtcctttaaggacttgtctgcattagttattctagttatccattcgtctaattttttttcaaagctttttacttctttgctattgtttcgtatttcctcctgtagctcagagtagtttgattgtctgaagccttcttctctcaactaatcaaagtcattctccgtccagctttgttctgttgctggtgaggagctgcgttcctttggaggaggagaggcactctgatttttagttttcactttttctgctctgttattttcccatgtttgtggttttatctacctttggtctttgatgatggtgatgtacagatgggtttttggtgtggatgtcctttctgtttgttagttttccttctaacagtcaggaccctcagccgcaggtctgttggagtttgctagaggtccactccagaccctgtttgcctgggtctcagcagcagtggctgcagaacagtgcatattgatgaaccacagatgctgctgtctgatcgttcctctggaagttttgtctcagaggagtacccggccgtgtgaggtgtcagtccaccccctactgagagatgcctcccaggtaggctacttgggggtcagggacccacttgaggaggcagtctgcctgttctcagatctccagctgcgtgctgggagaaccactactgtcttcaaagctcagttggaaatgcagaaatcaccagtcttctgcgtggctgacactgggagctgtagacgggagctgttcctattcggccatcttggctcctccccttccttaatgtttcttcgcttaattaatctttcttcccaatgtagttcatttcttagtttctttgtctttaatcattttcctgataattcagacttgtggaaaattgctgacacatgtccattcatcctcctggcccttttatttctccttgtcagtatagctcgtatctttgtaatttcctccattccaggagttcttgaggcttgggctctccatgattactttaggtttctctgtctcccagtctgtgatgtcccttccagccatatccagtctgttttcaacaaaattctgaccactctacttctattttcaaaagccccagtggttcttatttcctgcctgcaaagtatgtttctttttcagattttcagagactatataatatttcccttaccctatccaaccatatttcccactgtgaaatagttattactacaagttaggaaagtatcttattaccagttatgccttttgactttatttattgcaatttccccaccactaaaatagcttcatttttttattcctttggcaaaaacaccgcacattcttaacagctgagttccatgcttttcaggaatcttctctggtgacctgagcacacaccaacctctcctttctttgaacttctgttacatctaatgagtgctgaatagcttatcatctaaaatcctagatgcttctagagctggaaagtagtaggcatcagctaatcatctgtgcattgtataaatgacagaacatttgtgatttgcccttgatcatattatttaacagcagagcctaaattagatctgtcagttaatttcctatatacagcttgcctgaggtagcatgaaagcagccatagaaaatgtttaaactaatgaatgtggttgtattttaatataatgttatcaaaaacggactgcagtcctgctttggtttgtgggctatagactgctgatccctgttctagagtagtaactaacaactgcttcccctaatttttctcctttgtgttgattttaaaacaatgaaacacataaaccaggggtccccagttcccatgacacatacctgtggaacctggtggcacagcaggaggtgagccagtgaagcttcatgtgtatttacagttgtccctcattgctggcattaccgcctgagctctgcctcccgtcagatcagcgatggcattggattctcataggagcgcaaactttattgtgaactgtgcatgtgagggatctaggttgcttgctccttattagaatctaatgcatgatgatctgtcactgtctcccgtcacccccagatggggaccatctagttgcaggaagacgaactcaggtctcccactgattctacattatagtgagttgtataattatttcattatatattacaatgtaataataatagaaataaagtgcacaacaactataatgagcttgaattatccggaaaccactcccctcaacccgggtgtgtggaaaaattgtcttcccctaaaccagttgctggtgccagaaaggttggggaccgctgaaataacagaaatcctcactactgcttttatttagaagcattttcagacaaggaaggatgtacaatttatttttattgtcaggtataaattttccatgtttaattcagctttagaagtcatatgataatgtttgaattgagaaacattactcttaggtaataagaatgcatttaaatatatcctataaaatagacacgttatgcatgagtgaggggtgcattttcagtgacaagtataacacttgaaatctgaagaattgttggtcttccatacagcgtacttggaatgaaacaaaggtttacaacaagttactacaagaggtagaaatagaactagggaacaatttgtttcatctactcaagtctgttgaagtataataattaacttctgaccattcttggccttttaagttctcagggctctcctcataggaattataccgttaaccctgctctcctgggcaaatttcaaccaatgtaattatattcttagtcttacctgaattctctccatagagtgtaattatctgagctggattcttcccagggcactgggctttagcacagctactactctccctatctttagtccacgactgttgggtaatttcatttctgctcttgaacagttagctactatcctgcctgaagaattggcattttatgttgagtagtgtacatttgatttcactgtttaccttgtataagattaaaactaaccttagcaggccacttttgaccgtgggcaggtcaaagacgtaagtgtggtgaaattatagcagaaggggtaaatattttcaaataaagatcgtggaatcaaaaacatagagaccttttaagttttgatgtcaaaaaccactgtttttttccacattattaaaattagcagttaagtttttttcatctccaggctttatactcttaaaaattactggattatatctgtgaatatttgttgtgttagaacagatttagtatacttttaaaatttgtttaaaatattactaaactcatgttaatgtaaatatattatgaaaaatatattttgaaaaatcttgaaaagagtggccttgtttacagttttgccagtctcttaatgtctgacttaacagaccacagctgtttctggaatgtcttgtgatacattattttacttgaagtatgtgaagaatatcctcacacataatatgtaattggaaaaagaatgttttaatagctttttcagataattgtggatatttttcttcaataatacaccaaaagttaacaagtggtaatttctgtaggttaattgctatgtggaatctgaaatcatatcagtgaacttttcattgttttcattctttgttacattgaaatctaccagcctgccttaataccgggtatgcatacatttattcacttattcattggagtgtgtgtgtgtgtgtaacttctatttttttttccttgcactttgagtgaatcttacccatggatgattttgtaatatcaagtattggtcatttggaaattattggctctctgaaagattatgcagactttccacatgttgatacatttcattatgtgatatcaaaaagtatcatttttaagtaacaccaccgatcttagaaaaatcttcaagtctttattggtggcagatacaagttttccaaaattctggtttttgtttgaaaggtcaaattttatcattggcgacaagtactgtcattttttcccatgggaaagtcttgttcagtcattattttcagaagtatcagctgaataagcatagtttgtccatcattgtttcaattaaaaatggcattccataacagctaattcagcttgcagctttaacaggtatacaaatgctttccttcgagacagccatcgtatttaggtatgcagtagaaatgctttatgcatgctcaaaggatggtttttaatacaattaataatttttgctgctttatcaagaacaagtgaagctgaatttttatttctcttttaactgcagttagtacagtttagatacattgcggtgatttgaaataaggcaccaggagttttacctgctgttgtttttgcatcagcagtataaatgtccactcagtgaaaatggtgaatgaggtcttagttttattatgaaaatagttttgacttccttgactccctgaaaaggtctctgggatgctcagagggaggtccgtgtgccacatttgaaaatcatggttataagccttgcagaggacagtgtttaatggtccccttttcttacagttattaaaatgtagtaaccattctttttattttttattttttacagacaggctctcactctgtcacccaggttggagtatagtggtataatcacagcttaccgcagcctggagctcctgggctcaagctctcctcttgccttagcttcccaaagtgctgagattacaggtgtgagccacagtgcccaaaccctaacagctcttttgttttatttcatttactttggtattctctaagactattattatgaaactttgctcatttttctaggcctttattctcaattttattattttgttcaagggctgacatgaccatattaacaattatccttagatgaacctttacaagttaagtggtagataaaaaaggaagagactgaaaaagtgtttaagaaaacatttactagcaacctacgtggccactgaaatatttaaaagaaactaattgaagttaacttttcattttataacagtgattgaaaatcaactgctttgtctgcccaaagcattctaagtctattctgttatttgaggaagtcatttgactgtctgtgtctcagttctctgactagctgacattgctgtaaatttggtatgtatgtccaggaattgaaataggcctccgtggaaagaaatacaattatttatttaaactctctaacagtagtttagttgtggcttggatctaaagacaaatattagccaatccagtctatatccccttccccatgcattcattgtgtttgtagaaatggtatatgtctaagtatcaaacgagttgtatctatcaaagacaaaaatattctggttcaaattatagataacaataagattccaatcaaaacaaagaggtaaataaatatctggtcatgatccttttgtttatactgcaaatgtcgatattgcttagtggcactgattgatgatttatggccacacatgtacccattgtttctgcttcactcctcctggttggctttcttatagtaccattcttccatgaggaatggcaagtaaataaaccagttgatacctacggagcaagaaccaccattgaaccatggatgctgattttagaaccttgctcaactgatgggtgcatgatgtgcagaaattttatttgactattatttataacaatccagacagacctgttactcatttttagattttctttaaaccagattctattattaaacattaattcagcaagagattaagcaaatctcaactgatgacttaaggaaaattgacacattttctcaatatgttcataggaattctcttgtttaataatttaaagatattatagactttataatacaaaaaagcaacagacaagctgatatttttggtacgatattatttataattcaaagaaatgtaaagagtatgctaacttggagatgttttggttggaaatggtgcccacatttgatgactttctgcctccctttccgttttgtctttccatgtgtcttttaaaaaatatatactgttgcagtttcatagctgtcaatgtcttctctttctgaggatattaattaataaattcttcctccctctgtatagtcattcttcaagttgcttttttctgacgctttcaggtctagtaatctttggttggttgagtgtatttaattgtggaccaggttacttgaatctcctaaggcattattgcttatttatatactgtccagcttccaaagtttattgcttttacctctactccctgtacctccataatgatgtatttatgacgttttacaaattttgctctatcatttaaataggactttggaaggtagcagatgatagtgtgtattttgttctcatctttacttgaaataatttgcttatttaaatgaaagcatctagacagtaattgaaaccatgagttgagttcagcaagtactaaagtcaatatgatagcttaagaaaatgttttagcaattatatttttatattgatatagatcccattaaacagtcatatgggttcaggagtattagttatgaattatcacatgtatattttaattaaaatactatagggttttaaaattaaattatgaattatttaagaataagcctatttttatttacttaatgagttaggtagttctaattaggtaaatgtaaatagaagtgaccatcttaatgccctacaatgtaagcagtaattcacaatttgtaaagatttataggaggacaaaatcagtttgatcttgaatatgcttaaattttgcacgcttgtacatttctcccaacttaccaagtggcaccttctagggaaacaggtttcaagaattgtatccttaagtttttaccaactcccccccaaatactgtagtaataagtggctttggcttgaatagtgggatgtccacaagtgttagaatcagctatacctggctttagatcttagctccattaccttttaaccatgtctaagaagaacaaaatgcaaaatattactgatacccttactttggaattattgtcaggattaagtgagatgaaatatgtgtagtaactagagcaatgtcagacattcagatattagtttccttctcttataagcccctatgtagtttttatttctttaggatgacagacatgagttctcccattattttctcattgcctgtgctttattcatattaccatcattatccttcattgcgaagaatccattacatactatagtgaattaacaataaaattcaagatgaatttacacaaaaaggaggatattatttttacacaaataaatattaaggtaatgaaaacagttttgctattgttgacaatcattataaaattgtttaccatgtcttgtaattttaaaagtttagtttttatcatttaaagacaggtattcttattagacacttgacatctgttagtctcaaaatttgctatgttttggatcgcttacaagattagctgagtgtattagtcagggttctccagaggaatggaaccaataagatatatatacaaaagagaatttgttagggagaattgattcatgctattacataggtgaagccccgccataggccatctgcaagctggagaatgatggaagccggtagcatggctctctctaagtccggaagcctcaaaaccgggtaagctgacagtgcagctctctcagtctaaggctaaagacctgaaatcccccaagaggctgctggtacaagtcccacagtccaaaggctgaagaacctggagtctgatgtccaagcacaggtggaggaaaagatgtactgttccagaagagagagaaagtaaaaagaagagcaagcaaactgaatatcccccttctgtctgctttgttttagctgtgctcacagccagttggcatgggcaactgttctagttcctggccactttgttctagaccctgcccactttgagggcaggtcttcctctctcagtacactgactcacaggggtgccttgttatatttcccaggctggtctctaactccaggcctcaactggagttgtcatcttctctggaaacatcctcatagacacacccagaaacaatacttcagcagccatctaaacatccctcaatccagtcaagtttacacctaatattaaccataacactgagggtagtgaatatagttcacataacatagttacaatagcttaggtgctagatatttcaaatacctcattcattcattggcaactacatcatcagccgggcctggggctatgatggtgaagaaatgtatcagttatttattgcagcataacaagttactccaaagtatattgacctaaacctttattatctcatagttttgtggggtaggaattgaggcataggctgttctgtcttggggtatcatgaggttgttatcaagatgtctcctgacgtctttcacattgtatactgtatgtcagagcatcatgtgcatcttgaatatatatataatctttgtcaatattacctcaaagctggggaaaaaagatgtctgctgaatagcagcgtttagtcatttgaaggcttgactggggctggaggaactactttcaagttagctcagtcacgttcctgccaggttgatgctggtttttggcaggaggtctcatttcttccctgtatagatctctccacaggttactcgactgccctcgtgacatggtggttggcttccaccagagcaaacagtctagaggaaggtggaggaagatggagaggaagagaaaaggaaaggagaagggggagtcacagaagctatctaaaaagaatactctcaaaagtcacatagcatcagttctgtcacattctttttatgagaaggaaatcactaagacgggcccatgttcaacagaccgagattagactctgctttttgaagggagagatatcacagaattcatggatatatttaaaaatcaccacaatataacacctttcctttccagatactaagtttcacaggtgacttgagactacagttacgttggtaagtttattattgtctaacactgaattagagttaccaattaagtaccaaaatgcaatgagaaagtgatataaaagcattatgtgcaaaaggcatgccttttttttttttttacaaaaattctgctaatttggggtatttttgagttggatatcttactgtcttttcagattcagaagatttataatcagactgactaaacacatctccaaaccttctaatttcttgttcgttattgttacatgtttagactgaaatagagagggaaaagatattaccaggtttactgcagtgtggaaaagctgttggagaagaatggggaatgaaaaggaaagagacaagattctttggacaaggcagaaggaagaagttgaaggattcaagttaaaggataaccttgagccgggcattatggcttctacctgtaatctcaaggacttgggagactgaggcaggaggatcacttgagccctggagttcaagaccagcctggtcaatataacaaggcacccctgtctctataaaagtacgtacatgcatgcatactcatacacataaaagataatgtcagttgatggcatgagtgtgaaagcagagctgtgtgaaacatcactaaggataagataataaggatgtcattattcctagactgtgtagcatgatttttttttaatactttcagttctagggtacatgtgcacaacatgcaggtttgttacatatgtatacatgtgccatgttggtgtgctgcacccattaacttgtcatttacattaggtatatctcctagtgctatccctccctcctgccgccaccccacgatgggccctggtgtgtgatgttccccttcctgtgtccaggtgttctcattgttcagttcccacctatgaatgagaacatgcggtgtttggttttttgtccttgtgatagtttgctgagaatgatggtttccagcttcatctatgtccctgcaaaggacatgaactcatccttttttgtggctgcgtagtattcgatggtgtatatgtgccacattttcttaatccagtctatcattgatggacatttgggttggttccaagtctttgctattgtgaatagtgccgcaataaacatacgtgtgcatgtgtctttatagcagcatgatttataatcctttgggtatatacccagtaatatataccaggtgtatatttggctgggtcaaatggtatttccagttccagatccttgaggaaccaccacactgtcttccacaatggttgaattaggaaacagtgtagctctctactgtagatggttaataaaatatggagaaccattagtgtaatcagagagacttgggttgccagtggctgcttgtacaaccttggtcagttgcttacattctctgtgctttagtttcttaatctgggaaaaaaaatggattgaactaaatcatttccagtgctaacatgttatacctttggaaaggaacttagatatagttgaaacaatttgaatttctctagtttttagtttttatttatttaaattttttctttttaaatcgtgggtacatagtaggtatatatatttatgggatacaggagatattttgacacaggcttacacatcaaggtaaatgtggtatccatcccctcaagcatttatcctttgtgttacaaacaatacagttatactccttcatatggtttggatctgtgtctccaccaaatctcatgttgaattgtaatcgccagtgttggaggtagggcctggtgggaggcgattggatcatggggagtggtttctcatgaatggtttaataccatcaacttggtaccatcttcatgatagtgagtgagttcttgccagatctggttgtttaaaagtatgtagcacctccctcctctctttctcctactcataacatgtgagatgcctgctcgccctttgccttctgccatgattggaagcctcctgaggcctccccccaaaaaaaagctgctgtgcttcctgtacagcctgcagaaccatgagctgattaaacctcttttctttataaattacccagactcggatatttctttatagcaatgcgagaacagactaatgcatgagatattttgatgcaggtatacaatgcataataatcatatcagggtaaatgtattccttcccacaagcatttagatttgtgttacaaacaatccagttatactccttcagttatttttacatgtataattattattgactataacccaccctgatgtgctatcaaatactggattttttttttttaatccgttaaccatcccacgtttccccaatcatccccctacccttcccagcctctggtaaccatccttctgcattctctctccctgagttcagttgttttgttgattttttatattgtttcttttgttttgatttcatttatttctgctctgatctttataatttcttctactaaatttgggtttggtttgctcttgctttcctagttaagatgcatccttgggtggcttatttgagttcttttttgacgtaggcaaaaaagtactgctctttctgtatcccataggttttgctgtgttgtgttttcattatcatttgtttcaagaaagttttcaattttcttcttaatttcttcattgacccactggtcattcaggagcatattgtttaatttccatgtgtttatatagttttaaaaattcctcattattgatttctagttttactctattgtcatcagagaagatacctgatactatttcttttttggtggagaatgttttgagaattgttttgtggccttacatatgttctgttcttgagaatgattcatgtgctgaggagtacacagcgtattctgcagctgttgggtgaaatgttctataaatatctactagatccatttggcctacagtgcggattaagtctgatatttctttgttgattttctgtctggatgatctgttatatcatcttgctaattgacccttttattgttatatagtgaccttcgtttcttacagtttttgtcttgaaatctgttttgtctgattatagctactcctgctgttttttggtttccatttgcatggaatattttttttctatccttttattttcagtctctttgtgtctttataggtgaagtgtgtttcttgtaggcaatggatcattgggtctttttttttttttttttttgagggcatctcgctctgttcccaggctggagtgcagtggcgcaatctcagcttactgtaacctctgcctcctgggttcaagtgattctcctacctcagcttcctgagtagctgggattacaggcgcataccaccatacctggctaatttttgtgtttttagtagagtcggggtttcaccatgttggccaggatggtctccatctcttgaccttgtaatccacccacctcggcctcccaaagtgctgggattacaggtgtgagccccggtgcccagcctgtcttgtttttttaatccttgcatccactctgtgtctcttgattggagagtatagtccacttacattcagtgttgttactgataagtaaggatttgctcctgccgttttgttacttgttttctggttgttttgtggtcttctcttccttctttcctgccttcctgccttccttttagtgagggtgattttctctggtggtatgttttaatttcttgcttttagttttttgtgtatctttggtatgtttttagatttgaggttaccatgaggcttgtaaataatataaccattattttaaactgaagacagcttaacactgattgcataaacaagcaaacaaaaaggaaactaataactctaacttggtctctctgctttttaactttttgctgtttttacttatatcttgttgtactgtctatgtcttgaaaagttgctgtagttactctttttgttgttgttgttacagggtattactttgtcacccaggctggagtgcagtggcacaattacagctcactgtggccttgatttcccggtttcaagtgatgcccccacctcagcctcctgagtagctgggaccaaaggtgcacaccaccatgcctggctaacttttatattttttgtagataacgtgatttcatcatgttgtccaggctggtctcatactcctgggctcaagtgatcctctcgcctctacctcctaaagtgttgggattacaggtgtgagccactgtggcccgccatagttattatttttgttgggtttatgtttttatctttctactaaagatatgagtagttacatcacaattagtgttataatattctttgtttttctgtgtacttactattaccagtgagttttgtatcttcacatcatttcttcttgctcattaatacccttttctttcagattgaagaattcctttagcatttgttgtaggacaggtctggtgttgatgaaatccctcagcttttgtttgggagagtctttatttcttcttcatgtttgaaggatattttaaccagatatgcttttctgagtagaagttttttttccttcagcacttcaaatatgtcatgccactctatgctggtctgtgacgtttccactgaaaagactgctgtcagatgtattggagctccattgtatgtgacttgtttgttttctctcactctttttagtatcctttattcttgaactttgggagtttgattattacaagccttgaggtggtcttctttgggttaaatctggttggttttctataaacttcttgtacttgaatatcgacagtctttttctctaggcttgggaagttctttgttattagccctttgaataaactttctacctctacctctctctctttacctcctctttaagggcagtaactcttaggtttgcccttttaaggatattttctagatcttgtgttagaaaattttggtgcagctgagctggcatcaaaaccacaagacaaacttcttcccactcttcccctcccctttccccaggcagaggagtttgtccccattccattaccaacacaggcccacggggagtactgctaggctacctttgatgttcatgccgattttctaggtgtgcttcattttttttttttttttcatttgtctcctctgactgaaaattttcaaatagcctgtcttcaagctcaccaaatcttgcttttgcttgatgaattctattatgagactgatacattcttcagtatgtcagttgcatttttcaactacaggatttctgctggatgctttttaattatttcagtctctttgatgtatctgataggattctgaattccttctgtattatcttgagttcattcaaaacagcaattttaaattcttttgtatgaatcgttgcataactctgcctctccgagattggtctctggtgccttatttagttcatttggtgaggtcatgtttttctggatggtcttagtgcttgtggatgctcattggttttggggcattgaagagtcaagtatttattgtagtctttgcagtctttggttgtttgtaaccgtcatttatgggaaggctttccaggtatttgttggaacttgagtgctgtaatctaagtttgtagtccctgcaactgtatttccattagaggataccctaagcttagtaatgctgtgattcttgcagacctgtagaggtaccatcttggtggtctttgttaagatctggaggaattctctggattacctggcagagactcttgttttcttcctttactttatcccaaacaaatggagcacattctctctgtgctgagctaccctggagctggtggagaggtgacacaagcatccctgtggccgccacccctggaaatgcactggctcagacctaaagccagcgcagcactgagtcttatccagggtcccctgtaaccactgactggctactgcctgtgtttgcttaaggtcctagagctttgccgtcagcagttggcaaaaccaaccaggcttcagggtgatgccttcccttaggtcctgtatgggtccagaagtgccatccaagagcgagggcccggaggtggaaaccttagaaatttacctggttctctgtgctactgcacctgagctgccaccgaaaccacaagacaaagtccttcccactcttccttccccttaccccaggcagaggagtctctccctggtccattgtcaccacaggcccacagggagtactgctaggctacctccagtgctcacctaaggccaagggctcttcacttagcttgtggtgaatgctgccacacttgcaattccccccgtagggcagtggtctcccctctgccccaggacagggccagaaatgctgtccaagagccaaggcctacaactggcgaccccaagagcccacttggtgcttttctctattgtggccgggcacaagacaaagtacccttaatctttcttctacttttctcaagcagaaggagtctctcccatagccaccacagctgggaatgttctgggtcatacctaatggtggcacgcctcagagtctcgctcaaggcccacggcatgtactaccttggctactgctgctgatcatttagggcctaagcgctcttaagtcagcaggtgatgaatcctgacaggactgggtgcttctcttcaaggcagtgggctcacttctgacccaggatatgtctagaaatgtcatccagggaattagggcctggaatggggacctcaggactctctctggtgccctatcctcctgtgactgagctggtatccaagttataagtcaaagtcctctttactggtgcctttcctctcctcaagaagaaggaaagggccacttttgttgctgtgagctgtgctgcctggagttgggtaagcatggtgcatacgctcctttagcctccttggctggtgtgtcactaggtcatgtgtccccccaaatgtgctggctctgagcccagcacggcactaggacttgcctaggaattgttgtccttgtggcctagacagcctttcaagttaatttagaactgtgggggtaaagcttgtgaaagttccaggctactggtatgggcagttcccctgtggctagtgctggtctcaatgccttcttcatgggcatcacctgagttctgcccagcattgctttctgctgtgacagggcatcagtgagttccaatgcaaagcccacagttggtgtgctctccgtcccccaagtgcacagattgtctctccgcaccatgcagtctctgctggtggatggggaggtgtattagtctgttttcacactgctgataataacataccggagaccgggtgatttatacaggataaagggttaattggacttacagttccgcatggctgggaagcctcacaatcaatggtggaaggcaaggaggagtaagtcacattttaacttgaatggcagcagacagagagagcttgtgcagggaaactcctcattgtaaacccatcaggtcttatgagacttactcactatcatgagaacagcacgagaaagacctgcccccatgactcaattacctcctaccgggtctctcccacgacatgtgggaattcaaaatgagatttgggtggggacacagccaaaccgtatcaggaggggtgatgtctgcaattcaagaccctctttcttacccttttcagtgcctctttcagcaatatgaagttaaaaccaggtactgtgatcgctcacctgatttttagttcttatgaaggtgcttttttgtgtagatagttgttaaatttggtgttcctgtagggacgacaatcagtggagcttctatttggccatcttgttctgactccctcttatctaggttttaaaaaacaagtttcctccctactttttgattctaatggataattccaagcttctctagtgtgtttaatggtttttttaaaaaggtatttatttatgacagggttttaaaaaaattttttttattaatgaatgaatgacagggtcttgctctgtctcccaggctggagtgcagtggtgtgatcacagcttactgcagcctcagcctcccaggctcaagtgattcttccacctgagcctcctgagtagctgggactaccagcaacacagctaacctttcattaaatggaagccaatagcaaatcagattatacaattagcactaaagttgctatttaatcaatatatattttaagaaatatattcatcaataggttataacttgaaagtgtttattagagaaacaatgtattggtccattttcatgttgctgataaagacatacccaagactgggttatttataaagaaaaagaggtttaatggactcacagttccacgtggctggggaagcctcacaatcatggcagaaggcaaaaggcacgtctatgtggtggcaggcatgagagaaaatgagagccaagtgaaaggggaaaccccttataaaaacatcagatctggtgagacttttacttaccacttattcactaccacgagaacagtatgggggaaactgcccccatgattcaattacctcccaccaggtccctcccacaacatatgggaattatgggagttagcattcaagatgaaatttgggtggggacacagccaaaccatatcaaacacttcccaaaatttacaagcaagaaagagttaaaattggaaatatatctgtgtaaataacaatctgcctatacattgtcttataaattaatttctctttacatagttttgagtattattttaagattgcatcttttccagtgttccttttgtcaaaaaatgttttcatgaggaaggagaatgttgtgtgtttaagaagccaatgtatattaaattgagagaaactgagagtcttttacttttactttataggcagtaaagtatttacaaaccatgactgcttatttaaaaccgtaagccaaatttgtattgtagttaatccaaattgatcctgttaagtgaaattggttaaaatctggttttataaactttttaattttataaaataaacaggaaggaattgtgtttatttatttattaatttattcattactctcttgctgatgttctcttcggtctgaaatggacctggctgttcttctaaaacttaacattcttagtgagaacagttataggtgaacaaaatctcctttaatgttttagcttctacctctgtgaaaatgttgtgtgtgttagcttcagtaatacgctatgttttgttttcattttatagtttatatagtgttgattgtgtgccagatactattctgatttcttttatttgtattaacaaatttaattcttacaacaatcctgtgaccaaaagctatccttctctaccaggcatggtggctcacgcctgtaatctcagcaggcagatcatttgaggtcaggagttcaagaccagcctgaccaacattgtgaaatcccgtctctactaaaaatacaaaaaaattagctggatgtggtggcaggggcctatagtcctagctacttttgaggctgaggcaggagaattgcttgaacctgggaggcagaggttgcagtgagtggagatcgcaccactgcactccagcctgggcaacagagcaaggctctttgtcaaaaaaaagaacaacaaaaaacaaaaaacaaaaaaaaacccaaaaaaccaaaaaacaactatcctcttgttgacagatggttcttctctggcatcaaggctgatagctgtgtcatggaacatagctgagatccctaagatctggctagcattggtagtttttccccagtggtggacttagagaatagttttctttcaagaaggagacttgtcacacacccactgcagccaccatatgtgaaagtctcctgcccatgggaaagccaggctttacttgagtgattacagtgcctagtgtaaaggtacccatgtagaaagctgggggttgtcatagtcatctttctccccttagtttctcacattcagtcgcaggtactactgttctttcaacagtgtttcactttattagtcccttcttccctgtgtccattgaaggagttcaagttgttattatctccaactggatgtgcttaagcagtagcccctgttcttctttcctcttatatattactccactctaattctttgcaagttgtaggcttgaatagcctttttctttcttagtaatgactttattaagatataattcacataccatacacttcattcaaattgaataattcagttggtacatgcacagaggtgtgcaaccatcattctggaaagaaatcctgtattttttaatagcagtcaccccagccctaggcatctgctaatctactttgcctctatagatttgtctgttctgggcatttcatataaaaatagaatcgtcttttagttaacataatgttttaaaggttcactgtacagaaaggttacgtatttggcctgggttcagccaagggcttgtagcacagaacatccctctgattgttcctcggaagctgcgaccttggatttgtgtatagtctggactactagggattattgtggctttagctggactctttgattaatccaccccggcatcccccatctcctgttaagcttttgactagtctgtgtctattggtatcatactcagctgtttgtctccactaattcctaacagtattagtttcctagggctgctgtaacaaattaccataatctgggtggcttaaaacaacagaagttagtgcctcacagttctgagaactggaagtctaaaatcaagtgtctgcagggccattctccttcagaaacctttagggaagaatcttacctaactggtctggtgtttgccagcagccgttggccattccttggcttgtatctgcatcactgcaatctctgcctttgtatttacacagcattttttctcatgtgtctgtgtctttacatggtgttcgcccctatatgtgtatgcccaaattttcctcctcttacaaggatatcagtcatactggtttagggtcgactctgattaacttacagatttgggaaggggattaggacttcaacttttttgggaggggctggcacaattcagtccataaagagcttgttctttaccagctgtgccacttggatctaccctgcagagcaggacctgtgtgtatacttgtttgtgaagacgatagaaactgatgttgccatccaactcccggcatctagtagggagagtcagagtggcaaaacaggcattgcctggctgccgctactacctacttggtacaggtcttctgtagcatggagctttgggaagcagtatctgctgatgttcaccagctgctaaatctcctaggaatagctcttctactcctgggacctacaggagatgagagctgctactcaactgaccccactagaatagctcttccataacacagagttgtgggggaatgggggtagtctcttatctcgaatgccatggcttcccactattatgactgaatttcgatagattttgttgaatgaatgttttacaatttgttgtaagccctctgatcaatctccagagactgaatcattgtctttgctaatttttgctggtttaataagtgttggagagaagagatttatccaagctctttatactcccattctagaagtctagccccttgaaccgtttttaaaagcaccaccttccagtgtagagattgggatgacatataattcatcaggtaatttatgccgtaagagaatgattcacattagtgtcaatgttatttttcaacatactcaactgctgtaaagttttataatcctttgtcataaaaatagaaattattttaaagtttaatagcctgctttttgtaccataaacaaaacatagaagaaaaacttaagtggttagagaagaatgctaataacctttcattcaatgagtgaaattattcttgaaatatttagtaagttatataaccaaagtcttcctttagctggaagctggaatttttcatagtgaacttaatagtgcatctctttcatgagtatttatttgatgtaaatgtcaccatctgggctgcaaattttctcttattcagttagttgaaagggtcggtaggatacctttaaaactttaaaaaactttaaatacatttagtgcctgcacttaataatttgtatctaagctgagttcaagatgtctaaaactggaagctatgagaaatttctgtttttcctcccagtctaacatactgttttttggacagaatccccatgtgacttgattaatgataaggaataatcacaaagtattttaaaaattattttctgtaaagcttcatagtctatatcttaagatggtaactatctctgtgtatatgttcatttattttaataatgcttttattattttagagatggtttgaaccttatattttgtttagtccaccctcatcattttgatgaagtaattaagtccagagagcatgtaacttcgtaagctttacagtctaaggttacatatataactctaaaggaaagaacaaaaaccataatacttccaaaaatccctgaagcagtgcgtagtattttttcagaaagctttcataaatacagtgtattttctctataatttaatattatcattattttgtctagcattaatttggtatctataataaataattgattttagccttaacttagctgtagagtcctaaggattatatatttatatattttttctattagacaggcattttcttgtctcctttcacaacatacgtggttcagtaaaacataaaatcacttgtcaatagttagtattaatataaatatataatatcgtgtctatacatttcacttaatttttgaatccatgaattaggaattatctagatttattaggcttaaacaaataattatttgctttgttttgtgctgtactgttgataaagaagctgtctatatgttattatatttgatcctcacaaccaccttatgaaggtaggttggacagcttttattatttctgttttattgatgaagaatcaggtttggtgtttaagtaaattgcctacattttataactttaataatttgctcctatagttacccatttatttttatgttactggttagtcatggtagtacttactgtcttgtttcttctagggaatacaaaagtcttgatttttattctagacgatttaagaagaccaatttgggtcatttggcatgaccccagggctagctcaggtgtaagtaatacggggtgagcatcccaaattcgaaaattcaaaacactttgtaattcacaactttttcagcaccaacataacactgaaaggaaatgctcattcaattctcaattggatttttggattttggatgcccactaggtaggtataatgcacatatttcaaaatctgaaaaaataaaatatccaaaacacttctggggttaagcatttcagataagggctattcaacttgtgtaagttaaacttctctgaatgccaggattcctttttttcccttttagcaaactcctgtccttattttagttttagttcaatgtcaccttctctgtgaaggctgccgtttttcacaggatgcagaaatctcttattcccctgtgctttctcatagcacttttgtacttgcctcacttggtacaagtattatttgttcatgccatgattgattattgagctccttgaagacaaaagttgtgatatacctcttcacttctccatggccttgaattaaccataatggagctcagtaaatgtttttaaagtaaatgaatgaacaaatggtacatgcttgatgtgtgtctgtaaactgtataagccaaacattgtgtactccctgtttctggaataactgtgcaatgctaaacatttctttgactacttactatatgatgtctgctggtttttgctgcataaatattctgatatcttcagttggtgcttagccagtttattcctgttccactgcatcacttatgattatttgggacctggatgaagcagtttcattgtaatgttgtattagttgaatctgtgattttataaaatacgaattaaatttcttataaaatgaagtttgtcactcatatttgtctaaatttgtttaaaaataaaaatcctagctaaactcttgcctatcccagaaatgaatttaaggaccgtattccttatgaattatgaagggaatttaaaagggaagcatccaggaaggtgtaattagtgtctggtaaactggctcttgtgttttctctgcctttcctctctttcttttaccagctacctgtagaccatttccctgtttattagctgcagtaccagaaggtggaataggaaatgaagtttacatccttcagttttgttatttgttagctgatttcttaaattttaggtgtgaagaactataaaaaagttaggttgtttgtgctgcatccttattattttttgtatcctgttatcacaggcattgatgacttatgtataattgagtaaagctgcaggaaagaaaagcacttaggaaatgcctcttcagattttcaagatcttttcacacctctcttggagaaaagaatttaaaaaaaaaaaacctaaatggattctaattattttctttatctgtggtattttgttttgttaaatagtgtgttatataatgaatagtggaattgggttcagttgtgaattacaggaagtgacacatatgataaagattgtggttttatgtctgttcaacaaaccacagtggaactgaaatgaaactataaatattttaactacaccaattgctttctgccgccaagcaggactagtcctaatgaaaactagataagctgatacaaagttgttgagaagcagtacagaatataggtccttatgtaccatcaggaaactttagcagttttgaatcttctaggcacacattacttttgatcagtaagaaacaattattaggttattttactcttttaagaattgaagtagccacaataaagctattgtgtgtttttttttcctttgggacaaggatttagatttaataataaaatgtgttttgtatagtaaatattcatgaaacaattgaaaagcaaataaaaacattcaatttgtgtactcttttcacaatttacatactaatctgaggctgggctggaggagaaatatattcccacattattcacttaccaggagtataccatactttcagaagctttttcttgactagtgatgactcttaagattttactgttaggatttgaacacttgtaggtcctttagtatacagaaaacattagatatatttaatgggatagcataagtaatttccattctcattcttttcttgagttttaaagtctaaacccatagacttacacacttagtctttgtccactagtcagaatgtttacactttgctaagtagttatgaacgtcctctccggtgtatttgtttcatttttcaccatgtgaggcttgactgcttagtttgtgtgagagaatgtgctactgtgagaaatataatagtgaatatctaacccctccgtatcactgaccttcggtctagtagaggagagaccattataaaaataactagggagcccttatatcctaacttctcttatcctggcaaaattatcaatatcaccctttttcactttccagtgttgtggtttgggtgatgagtgatatagtcacactgtgagtaatgaggggaaagaacaaatatttttaacctgatactttttctgaattcatgtttaggtggtagaggataccatttgattcttggagactcccaaatataattttctgtctcattttgacttcttgtagatacatgctttgtaatcttttatttttatttatttatttttgaggtggagtcttgctttctcgcccaggctggagtgcagtggcgcgatcttggctcactgcaacctccacccctggggttcaagtgattctcttgcctcagcctcccgagtagctgggattacaggcgcctgccaccaagcctggctaattttgtatttttagtggaaacggtgtttcaccattttggccaggctgttctcgagctactgacttcaggtgatctgcctgccttggcctcccaaagtgctgggattataggcttgagccaccgtgcctggccatctgtaatcttttaaaaaggaagagaagggtaccaattatctggcttttcaagatttttcaaaacattttttgaaaaatttctgagtttttggaattaaccctttgagcagctgctgagatttttatgttcttaaattggttagattaaaagaaacatttaagatgtgtctgtcccttgcctttttctaaataatttatgattaatgtcacatatcctatacaaaaaaaagtatgaggttgtatgtagttttgacttgagattttccagaagtcttttaatggcacataaaggttttttgtttgtttgtttttgttttatactttaagttcttgggtacatgtgcacaacgtgcaggtttgttatatatgtgtacatgtcccatgttggtgcgctgcacccattaactcgtcatttacattaggtatatctcctaatgctgtccctccccactccccccaccccaccacaggccctggtgtgggatgttccccaccctgtgtccaagtgttcttattgttcaattcctacctatgagtgagaacatgcgatgtttggttttctgtccttgcgatagtttgctgagaatgatggtttccagcttcatccatgtccctgcaaaggacatgaactcatccttttttatggctgcatggtattccgtggtgtttatgtgccacattttcttaatccagtctgtcattgttggacatttgggttggttccaagtctttgctattgtgaatagtgctgcaataaacatacatgtgcatatgtctttatagcagcatgatttataatcctttggatatatacccagtaatggaatggctgggtcaaatagtacttctagttctaggtccttgaggaatcaccacactgtcttccacaatggttgaactagtttacagtcccaccaacagtgtaaaagtgttcctatttctccacatcctctccagcacctgttgtttcctgactttttaatgatcgccattctaactggtgtgagatgatatctcattgtggttttgatttgcatttctctgatggtaatggcacataaagtttaatctgcaatacggaatctgatataccacccctttcctctcaccatcatctactctattttactaacatgaaactccttaagcagccttttaactaggacaaatacttgtatcaaccaatacagaaagattatttattgttcttataggcaggtttgtttgtggctgcagttagtattagactgtcacttgggatgttattctggaattgctttttctaattctttcagtgaaggtatgtgactcgttctcttttttccttttgcaaagcaaaggctcgacaaaattttatagactggtgaaacattttgcaggtctgaaaaaagtgttgtaaacctgctcatgaggttcagacaaaacttctgtgcataaattaggagttggtgttgtctaggagtttgtgaagattaagtttttcagggttctgatttcatgaaatgtcattctagatttctgtcaatctcaattataggatgatagaagtatgctgatttctcgcttaataattatgtagtatttgcaataagtatacaataagaacttatgtacttattgtacatattatatgcagtatacaataagtatacttatgttgtcttattaccataaacagagcagtggtcatgatatataaatactgaggaaatcaaatgttttctttttttgtgatctaatatgaaaatcaatgcaacatttctggataatttgcgacaataaaaaagaaaagaaatatgaggcatgcagtaatcttgacaagcaaatttcctaatttgcaaaataaaaaattacattagataatctctaaaaagaaccttctatctctgtgtcatctttgaatctataaaatacagttggtccctgacttacaatggttagatttaaatttttttgactttatgatggtgcaaaagtgataaacattcagtagaaaatgtacttcagtgtggtattcagtgagttacaggaaatgttcaacattttatttaaaataagctttgtgttagattgtgccatattttgcccaactgtaggctaatgtaagtattcaagcatgtttaagataggctagggtaaagctatgatgttttagtaggttaggtatataaatgcatttttgactttggatattttcagtttatgatggctttattgggatgtaacaccattgtaagtttagtcacatctgtagattcatttagctaaaatgccgtaatctctctctctctttttttttttttgttttgagacggagtctcgctctgtcgcccacgctaagtgcagtggcgcgatcttgactcattgcaacctctgcctcctagattcaagcgattctcctgcctcagcctcctgagtagctgggattacaggtgcccgccaccatgcccggctgatttttatattttttgtagagacggggtttcaccatgttggccaagctggtctcgaacgcctgacctcaaatgatccgcccacctcggtctcccaaattgctgggattacaggcatgagccatcgtgcccggcctaaaatgccttaatctcgataggctttttgcacatgcactatttaaattgagtacaatactcaatacttacgcccttgcccccttctccctggatcttatttgctaaagtagacattgatttctcttgaaaatgtaacaaaatttttgttgaacattttagtgtttagtgaaaagatgagaattctcagacatgaattttttatttgataataggaaactgtagttataggggaaagtcagtattttgaaaaggcaaaccaaataggcaaatatttatggagtttctaacacaagcaaggctccctctgtcagaatggacatcaggaaatgtccactgagtgaacattcaataaattttatcagttgctgtgggggataaaattatatataattttcgctttatagtttgttttgaatgttctggaaacagttaaaagtaaatgagtgtttatattttgccgaagtatcaagacagaatagtaggcagacagttggtatttaggcaggcaaaagggcagattctctgccaaatggttgtaaatgaattgacgcaaggaatttaaatattaagctttgatgagagattgttaaattttctcaatattattgtttccattggtatgcaagctaattagatacaacaactaattggagccggtggctcagactggcttgccaccattggcacacacactggatggcggcacagttgttctgattgttggctaggaagtcttccatcaaggcttagctgtagtcttatctgcaaattcctcctggtcttctctggagaacgttgccgtacatgggtctttggaaacaaggaatttcccaggaaatccccaccatctttactgtctgtgatattaatacaatttgtactcttcccttttaaaatattttagtgatcttaaaacttgaccactctggaagaatggagaagttctgtatttggcaagaataaaaagtattacaaagcatcctgcttctgcattaagtggtagtttacaacaaagctgctgatcttaattgtgcatttaaaaaaacaggaatcttgttaaaaatttttatttctgtgatgctaccccatacattttagtacagtaggcatgggataaaagaaacactcgagaagctagcctttcctcagctttcctagaatggagactgcctcctaaaatattcagaagtcagaaattattttaaaactaaagtgttaatgagcaaatttaaataaagttggtctgtaaatatgtacttcagagctgaacttagtaccctcttttcacagctctaaatgtaatactttcaattacatgaactcattagtctctattagcatacttccaggctttagaaataaagactttgaaagagctcttctcttattttattgtatggaagtaaacattgaaaaataaagaatccttacaaaagtaaacttagtctacgttgctggcagaatacatttattctataggaggtaggtgacagctgtttttaaaactttgacacataagtacaagaaagattagaatcctgtggtccacattatatattgaatagtacacgaattacaaggaggaatgatttgggtgtcccctaattgagtcacttgaatttggataaggcagagtgctttccctggaggtgtatggagagaattcacatgaccccttcattgtccagcagctttatgcatcaagattggactagaaaaaatgtgggatgaatgaatttaggattctaaaatgctccagacttttcagttctttttgtttgcatagttgcattctaagaacagatcgaattactatcctaggctcagaaaacacatttgaggttagttttgtccaaagagcatatttagtcttccttaataaaagtatataagaaaggatttattgttattaaaaaagattagaatgaaactgttaagctacttaattttttctaattatcttttatgattctgtaatacctaggtagtttatgcatataattaatatattagttgactattcttgcttttttcttttttaaaaaaattaatgtttgcatggaatatctttttctcttcattttctttcaacctatttatgtattactttggattttaaaagtaaatcaaagcgaagttcacatcttaaatgttctcatgaagttcttttgaattttttccattagtgtcagaatacatgtttgggtaagtggcacaaacacttttaaaatgtagaaaatggaatattggtacaaagcagagtagaaacagcttgattcaataagtcagtctttaagtcattaaacagatatttgttcagtacctgataggtgccaggtttaggtgcattgtttaggtgccagagagatagtaatgaaccaaacaaagaaaacaaagtactgccaacctggagtttacattgtagtggaggaagaagaaaatgaacaaataaactatatcatatgtcaaaatgtaataaatactttggagcaaagtcaagctgggaagagagcagagagatagctgtcaatggatgggggcagggaggggggtaaggtggtgatttcagatagggtgatcagagaagacctctctgacaaagtgacacaaagaccataagatggtgaggaggggacaaggtgtgctaatttgtctggtagaagagtgtctgaggtagaaaagggcatgctgacatgttagagggaccagtgggagattagagtgactggagaggagtgagccatggaaagagtgggaggagatgagagagaggaagtaggggattgagccatgatgaatcccgtaggatatggtaaagactttggtttatgtgagatgagaaatcactaagggttttgaacagagtagtcacatgatttagcttacatttctaaaggaacatttggtcatttgtgtatacttgtctagttgcttagtaaatgacagcagaaagacaagaatttaatgcaactaattttaaaattttttttaaaagatgaagttggactggataattttgcatggcctttttacttctaaagtcctatgcttctttaccttaatacggatctgaaataattgatttaaaaaattttaaagtatgtaaaggaatattgtggaataatttgtattaatgctattgctgtatattttgtatattcagtgctttattatttatatctttccacttttttttctttttgagatggggtttcggtcgcccaggcaagagtacagagtggcatgatgtcggatcgctgcagcctcgacctcctgggcatcgatcctcctacctcatcctcctgagtagctgggactacaagtgctgtgccattatgcctggctaatttttgtatttttagtagagatggggcttcatgatgttgcccaggatggtcttgaactcctgggctcaagcagtccacctgcctcaacccccacaagcatgagccattgtacctgggcatcttgccacttctgaaaaacaaatgcatacatggcaattattaaaataaagataaatcactggggaaaaacatttaaaagcatgtgactttaaaatttaaaaactgtatgtaataagattttgaagaaagaaaagttaataggatttatgtaacgaaagaaaataattgtgacagaaaactgggctaaggaaattggtgcatttgaacacaaattttagctttgagcttcctggcagccagtggggtgtgtgtgtgtgtgtgtgtgtgtgtgtgtgtgtgtgtgtgtgtgcagctatggatatctctctaggaaatttatcaggtgatgtttttgtttgagaaaaggagtagtatttagttacctgggaaatcacttctagatgccaaccaaatgtgtgtcactaagacttgaaatcattttgataatttaaaagaaacccagcactttataagactcccttgacacttctaaaaagtgatgacaggtgtgcatggctgttagccctggaaaatacagctatacgtttcgttttacaggtgataaaagcctctattttgaagcagagatttgtgaaaattactaggaaaagtatgacattggtgatgtattactctccctcatctgcaggtcccactgatatctctatattggttctgttctttaatagatcataatttcagccttaatctgaaatacctaatgccctgcaaggctctctgagactagtggttttcaaactgtgttccaggggatcatggaggcatgtcaaatgcagagagtcctgagcttctagagctttgaagaaagggttctttttcaatttaaatgtttcttaaatttcatacccagtgttcatcaaatatgatatttatctatgtctctttcgaaggctataaaagactgagagaataagttataggacatttcagtgactagccttggttatttttttctttaagagaaacagagttattaggactaaaagacattttgatgtttcatatcagcagtagggagggagaacctcagggacaggttttcctccccaactccccctaaaccttttgtactcctaggagacagattttctgccacaaaattgcctgccatgcctatttgactcagtttttttcacctgcaagagaaaaaattaagaccctacaaagctttcctagccttcatttgtttccattacaagagaatgatgaatgacagtgttaaaataatttgacagtatttataatcttgtgtattattgttagtaatagtaggagcagtagtatctcgtagtagttcgcagtgtagaaaatatttgcttctgagtattaaaggacatgaatatatctgagagatatatctgatatatgtctgaatgtatttatgagagatatattagtcatcacctccacataacatgaataaatcaagctttgtaaaggttaggtaactagcctaagataacagactagtaaatactagaatctgatactcaagttcagatcatagaacttaagatctcatgttctttcaattgtattattgttaaattaaaagtttcagttgttgatgcattttgtcctcacagaaagatcaacattaatttgattctttgtattatttagaaaagaagcagtttctatccttactcaaaacttatcttaaattgaaatatgcactctcatatctagtaacaagacatattttattaggttggtgcaaaagtaattgtggtttttgccattaaaagtaatggcaaaacctcgtagtaataaaatagtctgtactgatttttcttttaaaaagagatttaaaggtttcctcatctactttattctagtaaaacttactagtactttggggatgatttattgtattttttttttgagattatgagaagactttcaagaaatctctttgtctttgtcttctaagccctcgagatctctttctccatcactattgatggggcacagccgttggtgtgtaaacgtcctacaactgcgtattggtggtacctactcataggaaaagattttagtgtacaaaaagaggctagtatatttatatttcaccattttttaatgaccagaaattccaaaataaaacatagtaagtgaagaaattataactataatttcgaagtttattttaaataatctagaatgacttttggataaaaaggtatgttttgaataagaatgcaaacaagaaaataatagcaaacattcagtaagctgtactagcatattttggtactgatgaaagatcaactgtattatgtttttccttttgctaaggtgatgcttttcatgcctccagggcagaccttctaatgtatttttctgggcaggagcacattcagccacaggctttggaaaaaggcagttagctatatgattcagattgatcttatattgatcagctattgatatgtgaattatccagaatagctgtctgttctgtttgaaattcagctattttttttcttggtctataaagatctttacatttatgatgcaattgaaatttccattttgtgaaaatttgagagaaaggaaacttttgagccttaaaagctctggcagatatcacattaaatatgcacataaatgagtaccattcctaaataaaatgatttattttccagttgtatagatttccaggcatcttaattcttcttttgctgtgctttcaaatgggttattttgtgggtctcaaatatatttccttaaatatttggtgaatccttggagttagaagagaaaggaatattaccatcattttattagtgctggtcaattctgatgggggtaaaaattaaagaagctgatatggtaaagacgaagaaaaaataaaaatatggggagactgaccctggctttcattggcgtagttcatttctgcccttcctttctatagatttaaataaagacaagtatttattttgactaaatcacagacatataaggcattttcgggggtagattgcggaggtagtaaaataaactatagtatttcttggatttgcttatttcttgtagcagtgtctatattaatgcatcttgaattttatgcagtgtaattactgtttagtgaaatttaaaaaaggttttttaagagacatggtcttactctgtcactcaagctgttgtgcagtggcactatcatggctcactcactgcagctggggactcctgggctcaagtgatcatcccacctcagcctcctgagtagctgggactacaggcatatgccacctcacctggctaattttaaaatttttgtagagatggggtctcactgtgttgttcaggctggtcttgaactcctgtgctcaagagattctcccactttggcctcccaaagtgctgggattacaggtgtgagccaccacgtccagccttaatgaataatttttttaaattgaaaagtcacaaaacttactacgaacaaggtaaaaggtgtacagtttgacttagctctttgctcaaaaatactgataacataataagtagggtaagcctccccagtgcctcaaaataccagataccgtgttcatcattctctcagacatgagtgattaaagtaagattatttcatttttttatgatacctgctgtgctcttgaagaagactgtcttattttcacttactagtaaaagtgaaagaggaacattgttttaacattttaaaaataaaaattattttttaattattgttgatttgaaataatcagtttcctaatatgttggttcaggtttcctgagatgcaaggaaataataattgtaccagaatggggggaaaaggagggaagaaaaaggggaagagaggagaaaccagttgcaatgaattatagtccttatcatgttactttctgagaaataaaatgggcttctgattctaaaaaatatactgtatctgcaagagtaaaagtcgtaatctttcccatatttcctataggcaaattaagttactttagtggcaaagtacatttaaaggcccatttatttcttcaatcacatgatagtaaaagttttgtcaggaggtctgctgaactgagaatacagaatcagtggcagtgacagaacatctaaaaatttccaatcaccatctcctttagacatactggtccttgcattagtccttaagccaacataaatgatctttaatgtaaaattgtaacaagtacataaagcaggctaacgtagatattgcgtatctcaaagcagttggatttaaaataagtgatagttaacgaaatccaatactgtaatgaacttttgagaaaaaaatagttgattatgctttttaattgtgtgtttggggttttggcttttattattactgttaatttggccataagctcattatgttaatcagttttaacagtgtttctccatttgctggataagaatttggctgattggccgggtgcggtgttgcatgcctgtaatcccagcactttgggagactgaggcgggtggatcagttcagctcaggagtttgagaccagtctgggcaacatgatgaaaccccatctctacaaaaaatagaaaaattagccagtgtgttggcacatgcctgttgtcccagctacttgggagtcttgaggtgagaggatcacttgagcctgggaagcagagattgcagtgagccgagatcatgctactgcactccagcctgggcaacagagtgagagcctgtctcaaaaaaaaaaaaaaaaaattcagctgattactactttatagttatattttcagcattagctaggcaatataatgcagcagaaaggatccagaagtcttcacatccataaaaattatagaaagtgtagtttctatgtattgctggtagttgtcagtcactatatctagctaattttcgataatatcttttggttcatttattcatttaggcattcattcagtactaattcggccctgtttctgtgctgtaccctgtgtcgagcactgggatgtaacagtgtgcaatacaaagtccttgtccttaaggaattgataatctagctgggaaggcctacttgatgaattacagatgagtttagcacaaattgtcattgagagatgctgtgtgctttaggacgatttcacataggagtctaacccagactgggagttcagggacaactttactgaggaataatatttaagtgaagacttgaatgatatataagagttagcaggactaaggcggggatgtagggagaaggagtacttatagtttagtgggaacagtatgtgcaagaactggagtatgaaagaagaattcaaaaaggttaatataggtggaatgtagagaatattgagtgacttgaagctataaagattggtaggagttagatcatgcagtgtattttaggctacgctgaggattttagactttatctgacatatagagaaagccatcaaaatgagtgaaagtagagtgattagtttgtctatttaaaggctaagcccctggagattggagggaagcaaaattggatgtggggagatgaccaaaggctgtggcggcaacttgactgaaagatgtggtaccttgagggagaaaagtgggcagtctgagagctacctgggaagtataataaacaagacttgcaaaccatgagaaaagattacttaagatttcttcctggtgttgctatcaccaagatgggtaaaactggaagtatttgttggtacacttccagtggttgtatttgtgtgggtgggcatgttatttgtgcattttatgatcaaaatgtgcagtctaactggctcattaaaaacttgacaaaatttaggtgagttagcaattctgaaacaactttatgtgtagtttaagattaagcaactaaatatgtggtggatattaagagttaatttttttaacatcagaaaaaaagagctagaaataaggtaaaggggaatctataatgaaccttggattagaatttgagatatcagtatgaatgaatggagataaagagaaggttgcatatatgtgtatgtgtacatgtatgccttatatatttcttacttctgttcatgagagggcctagaagcagtgacatcatagctccagtcaatacacccagtaccagatcttgggtttaagtgccaggcaccaataaaaggaaccagagttccttggaaaaactgaattggggactgggactgggactggggaagtacaggatgaaagtggcaaaatgttcaaaaaatgatgggagcatgtcaaaagaatgtatgagccaactctaaggagctctcagtggccaaattagggacactttgagcactataataatgggccataacccataaaataaaaagtggtatccagatataattaagtaaattcaaacgggagaaaggaacacactttcttgccatggaattccaattagtaaatgaagagtcattgatataggaaattaccatttgaaaagaaacactacagtaataattgttttaggtgagaacagttagtggacaatgtaagatggttataaacaggatatttacagtcacaaaaagatctcactaaaagatatttactataattataaaggaatcatagtaaccttacagtggagaaaatggacatcttcttaaccaactaatcaaagtagacatactaataatgagacatggatatcatgcattttctgatatgatgtactgagaacgacacaacattacttttgtggtattcttgacaaaatgcatatcctgaatttaatcatagaaaacatcaaacccaaattgagggccatgctacaaattattgactagatttttagaaagtgtcaagattatgaaatatgaactaagcaactgtgccagattaaaggaaaccaaagagatctgataactaaatgcagtgtggtatttggatcaaacactggactagaaggaagatattagtaggacaattaacaaaatttgaataaggtttatagatcagttaatagaataatatcagtattagtttcctgatttagataattgtactgtggttatataagatgttaatgtttggggaagctgggtgaaagggatatgggaattctttgtgtaatgctttgtaaagtctgaaattatttcaagattaagaattaaaaaattacaaaaacttagagaccctagttaaatgttttctttaatttaatgaagggaagaggagatgatatggtggggttggttttattaaatttgactttataattatgttatgtttaaattttgattcctgagtatttacttcacttgaggatttttttttaaatcttcccattctcttaaacattgtcttgggaacagatgtatttttattgtgttagcaagatgtgtctttaaaatattttcttgaaatacagtaattgcacttctagaaatggattcattttaacctgatttaaaataatcaaagtagtcagagtgattaattttatgtttgttttagtttatttttaattgtcaggaataacgggaaatactgaaatatttagagaaaaagagttaggatgaaaagagggaaaacatttaaagtctttaaatatttggataatactgtgaattttcagttgttaactcccatttaatacatggataagctgaagcctagaagcttaactgttttgccaggacctacgtagttaacctatattggaggtgacattttaacctgtgtctgtatgtcaggctccagattttcccacaatactgtaatgaataaaagatgtatatattctactgaattgtaaagagccattactctttaaaattttttctttttgcctgtttgataatcatgttttcagaatgcacagtttttaacatttatttacattaaatttttagctaaaatacagagtatttataaattggttatggaaaagtgaggaaaaataatttgcatctactatgcactatatttttttcttcttgtgaagcaagtgcctgtcatgctctggaaaatataaatatgaaatctgaacagttgatgattataaaaataattacaggttgccattatgaagcacacagtcacacctaatcctttaaataaatgtgcttaactacactaaaatacatgttttaaaatgttaaacagagacattctaaaaagacacgtgaaaaccatttaatttttttaaagaaaaagatgctgagtgggtccatagtgggaattattttaaaacaagaaaaaagaaatctttagccctggaaacccttcttggactgcattagaaataaatttcctgatgtagcctgtaagtcagtcaaaacagggaagactgaatgctgggagcaataggtgtgtttgttaactctgaaatactgaaagtcagaaacatgtgaaaaggatggtcatgttaagtaggatctttaaagtcggtatataaaccatttctttgccttctattcaagcaatatactttcatccttctgttgtgtttcctcaattcctacactttgttttcgtactccccccaccaggaatgaggcaccaacaccagtgggagagttttagattccttagaaattctgcttatataagtgagtacatcaaatgatctttgccacaaaaatgatgaatgtttcttttgaaatgcagaccatggttccaagaagtttatgctcacagaatcaggagccttgcattgaaaaggtgtaagtcttgctaatagcctaaaagtctatttttttcacccaactgcagcattaaatattggaggtaagactacagacctaaagagcagactgggaagcaacaaattatcttattggtggtgatgttccttatagtaacaatgatgaacttttatagagcacttcctgtatgccagacaggaacccattaactcatttaatctttacagttgtttaagtactcatcttatccacattgtgtggatgaagaaactgaagtataattagataaatttacccaaagccacactattgagattctacttgagggcattgtaggtctcattttggacatatgaactctggtagttataaatacagtatatgtttttctagttgtgtcttcacctagaatcttcaagaccacaagctaaaggtttgagtgtaggtaagcttaggtttagggtctgcatttgagcatcttatccagctgacagctgtgaacagaaattaaaggtagcattttaaaactgtgtctcccacagctactcttatctgcataaactgtattctaaagcataatcatttcccctcttttctttcacttccttcttctcgttcttttttttttctaaaaatactttagtaattttaatagtgtagtaattgatcaaactatttgcttgcaaaagtatctggccaattttttctttgtgaaaagtaaacagcagtcagctagctgtgtatcagtttatcttagttctgaaaaggaatcaatgagaagatgtaaacaattatgacaaaaccaagacccaaaccacaaaagacttcaaagattaagtaattatgtatacatagttccatataacaaaactaataattgatagtagggaagtaaaagagaacaaacatttgttgatttcttgcccaagcattaggtgtttacaaaatgtattgtttacagtggagactttgaaatttcaaattcatttaggttagttggaggagggaggaaagctattgacagaaacactatttatttctgtctagctaaaaagaggatttaagcattatggggggtactttgatttagtttagtttttttttttttttgagacagggtcttgttttgttgcccaggctggagtgcagtggcacaatcatggctcactgcagcctcaagcccctgggcccaagtgatcctcccacctcagcctaccaaatagctgggactctaggcacacagtaccatccatcaaatcttttgtggagatggagtttctccatgttgcccaggaccttagcttatttgattgcatagtttatttagcacaggaggggatatgataggagagctcttccttccgcagataaaaatgttctcttccgtgcttataaacatttcactttagtctctatgagattgtgtgaatttttctgtggtcgtaggctacattttcacactacataaactatgcccctggttatagaatgcacatgcattctgcagtacaccaatgtatttgtttgtagttggctttattatttattcgtatgtgtatatttaaacattcctgacttggttcctgacaccaagaatacatacatgtatattttcttggaaatactatggaatataaatgagtattagcatcaccctgcgttgatcaggtgaatttgatagaaatgggaggggaaattttcttaataagtcctaaacccaagaataaacttttatatttttttttctgcttcatagctgtggaaaattattgcaaccaaactattgaaaccattcttaaagttaaaagaattgttattttaggacaaattttgaagataatacttttttgggggtggggaacttctgctgttattgttgctgtgctggaggaatggtgcttattcttttggtagcataactagtggtctgacatgaaaaactcttaaaacttaccctatattgggtctttaactgctattttatgttaaaaccttacatattagtatgtatatatatatgtgaatgcatacatatacaaactacattttcttatttttaaaatatcttaaggtacatgaaggagttaacatgttcatgaaacattgtgacatggaaaggtacttaggacttagtctaaaatggaaaaaaaaaagcaagacgcaagactgaatatgtagtatattcaatttaaaaactttctggccaggagcagtggctcacgcgtgtaatcccagtactttgggaggctgaggcaggtggatcacctgaggtgaggagttcaacaccagcctggccaacatgatgaagccacatctctattaaaaatacaaaaattagctgggtgtcgtggcactcacctgtagtcccatctactcaggaggctgaggcaggagaatcgcttgaacctggggaacagaggttgcagtgagccgagatggcgccactacactctagccggggcgacagagactccatctaaaaaaagaaaaaaagttctgaagtgaacatgtgtattacttttaaagtaaacttttgtgaagtatgtggcatgctcctcaagtgaacacatctgtgtaatcggtgccagatttaaaaaaagaacattgccagccctcctttccaaggagacctcgtgcctccttcacttagccactgtctggacttctcacaccattgataagttttgactgttttgggactgtacataagtggaattatacagtactactttcctatgtctggtttcttctgcacaatattgtttgagattcgtacttattttatgtagttgtagtttattcttattgctgtgtaatattccattgtgtgattatatcataattcattctatgtttatgggtagttctcagtttggacttaaatcatttgttacttttatcattcaaaatggattttaaaaaccagaaatatcaactaaatctagttttcaagtgaactctctttaaatttgcagatgtactgtgctaattattctgcaaattagctactttgatttgattttttttcagtcctgatttatcaggagtttacagatttggggatgtctaatcatgttattgattatgttcaacctgtttttcttcaagcatgagtactttgatttatctggttaagaaattttcagtccttcatactgaggtctcagtcatcttacaatagagacagccagtttactccccactttctagcctccgactcttgaaagcttccaagaaacacatccagaggtcacatattgggcaaccgaaggctcatgtgaaaaagccttagagccacaaaaaccttgcgcctcagtcattaatgtaatttggggcagattttatgaagcaaactaacgcctttgaatttttttttttcagttttaacgtgagtataattacttccactcctttttccactttccagtctctccgagttgcgtccctaaaggatcctgctgcaagaaatgagtgaatgaatgaagatattaagaattaaagtactgatgttaatgagagcatgggtgatgtggtttggattgcttgaggccaggagattgaaactagcctgggcaacatagtgagacaaaccttgtttcaaaaaaaataatatatatatatacacatacacacactaagtgaggtggtgtgtgcttgtagtcctagctgcttggaaggctgagatgggaggattgtgcccaggtgacagagcgagacccagtctgtattaaaaaaaaaaaaaattaaatgttgtatacttagcacataagtgatcattaaatgtttgatgaatgaattaatgaggaaagattttttttttgaaaaagaagttttatgaggagagaaaacattgcatatgtaaggcattatcctcaattccattgtggactctcccccaggtgtgcagccttgaatgatggaaatatcctcatgagattctgaaagaggaggaaacgaattttgcccttaaataggtgtcagtacagctgcacttatttgcacatttctagttctgcctctgactagagatcaattgtgatgactttgaatttgtagaccatctgcctgtcagtgcacttaaaattgcaactgatctttataagctgagtataactattattgtagcaaacagcaaattaagtgactatacactggaaagagttaggttcatacctccttgaagactgtgagctgttctttatttggacacctggtattaaactcttattggttattaatatttgggacaggttaatgaagacaatattttacagaatatagcagttttcaatataatagattcaatacaacaactttttgtgtgtttataattttgttacttattatttaccataagtggtttaaaatatacgtggcaaaacattctttagagctttgattgcaataattatcacataaccaacacctcttaagtattacgtacttaagaaggaacttgaactttatcttaacacaatagcattgacaaattactcacaaaattagtagttgtggaagaaaataggtataggaagagtaagtcactgatattgagtaaattaaagttatagacattaaattacagacaataaaattatagaagcactaaatagataaattgatttttttaatgtcatgttaagcatttaaattgcctttacaaaatattcttcacagtccttggagaaattgctgctgtatatttgattaatatgtgaacaacatttttattgttaaaatattttcttcattcctttcaaatttgtatttaaggttagcagagcctcaagcagtgcctgagtaggaaagtgataaactgacaccacactgtagaggaggaagaaaaacatctcaccaacggcagacagcagaaactaatggttttcaactgttgctgatctaatcaatcatggtgctatgatataatcagttctgtgtgattcgtttgttgttctactggaatgcattgtattcccttcttatttttaagcccccctacttctagttttcgcctttcttaaaaggcaatttctaagattgtgtttcttttaaagccaataagtaattgtgaaagacaaactcagagcctgttgaatttcaacaaaagttaagtattttgtaggacatacaacaatagtgttctttaattaaaatactgagccatatgaaaatttgtccaacatttggtaaatgcccttagttgaatcgttaatatcctagatagtaaaagattagtaccttttatctctagtctactgggtacagattttgctttcagatactatcatcacatcatcacacacaggttgaagatgacattttctcacctgttaaggcatgactttcagtaaaatgtatttagctgtcagaggtctgcaagcagtccatcagttgagacatgatgctgttttgaccgatattggtgacattttaaaagctacacaaaaattcataattataaaagtgttcactgtttcactaaagactgtgtaatgcattgcatattaattaataagatgttctcttttaaatgctatccctaaaatgtacttaatgttactttccattaccatgcataaagttttaaccatttattcatgccattagaaaaatgtagacttttcctttcttttcggtatgttccttttacttttctactcattatagagtcatgaacaactatggaaaaacacactttgttgattctttgtgatgtttttgaaaacttcgttcatatatgaaaacttctaattcaccttgctttctgaaggagaagactaagttacatatgagccctgttttgagtaatgtattactattagtattacagtatgaaagatttataatcagaagcccctttcccttgaagtggaattattctctatggccattagtacttagggtgatatactatcttcagtgctatcctgtgcctttccatttttgtcatgctacttccctctctttacatccctgcccacctccactttctgctgttaagaatagtccatagggactgtaaactagttcaaccattgtggaagacagtgtggcgatttctcaaggatctagaactagaaatacatttgacccagccatcccattactgggtgtatacccaaaggattataaatcatgctgctacaaagacacatgcacacatatgtttattgtggcactattcgcagtagcagagacttggaaccaacccaaatgtccatcaataatagactgaattaagaaaatgtggcacatatacaccacggaatactatgcagccataaaaaaggatgagttcatgtcctttgcagggacatggatgaagctggaaaccctcattctaagcaaactatcacaaggagagaaaaccaaacaccacatgttctcacttataagtgggagttgaacaatgagaacacatggacacagggaggggaatatcacacactggggcctgttgtggggtgggggcctgggggagggatagcattaggagaaatacctcatgtaaatgatgagttgatgggtgcggcaaaccaacatggcacatgtatacctatgtaacaaacctgcacattgtgcacatgtaccctaaaacttaaagtataataataaataaattacatttcttccaacgtatttatcagctacaaaaggggacccttttaatctccctctcaccaactactacttctgtgtctcaatttgtcattaaatcaagtgaggaatgtttattcttagagccatccttaaaaaagaaaagaaaagaaaagaaaatatcttgcacttatctttggttgatgacctaatatctggaacactgtttcttattaataagtttgtggtaggctataataaactccatataaagccatgccagttgtgcacatgtaccctagaacttaaagtataataaaaaaaagaaggggttcataagcaccctgtaaacactgaagcctattcaaaaggagaggggtaggacacatctcaccatcaatcatcgcaagacgacaatggtatgaataaccaatgtttacttcatacaggggctacttaaggaggtcactatatctcaatgtgaaaactccaatgaaccagtcactatgttcaattgaaatcaacctagagaaccttatctctctgcataaatgctcctgctgcatggtttttcatggccactggtggaattctgtgatgggggaacaggaaatctggacacagaagggtgggaataaaatgagcctgtgctgctttcaaaaaaaaaaaaaaaaagaatagtccataggctaaagcttattgctagggttaccacctagaacagggaagcttaattgtgaattagaaagtagatttttttctttttcaaagttcaaagataagacaatagccagacattcaagtggttaaaggattttctgagaacttccaaagctgggtttttacctaacaaaaagcatatttggaggattattttatgtcataatcatagtaagaagagtaattctagacaccaaggactggtcagtccatcccatttaggtatgggggactgaggtacatagattcagagtgggtgaggctagggtaagaatgatacctgggccctgaggagggaataagttccctttatcttagaggtgaaacaaaatagaactttcacaaaggccaaagagtaatccctaaaactgcaggctgttgctagggtttctctgggtatggcctgcaaaacccacagacttttggaaagtcttgtttggagcaaagtgccatctctgtcatagcacagtagtaatgaataaaggatgaaggacaaagccaaagggcagtttttatagggttctgcacactccagggtaatgcagagaaagcaaccaagagttttgactatcccctgaccacccccccaccacctccccgcaggagttgatagtactgagtgggctgcaagactgaaattggcttggtttcaagagggaggaggaggcagctctatgcagatttcttgtgaacagagagattggacatctctctgcaactactggcacagcttgcctgctgaccaagtggatgaagtcaaagcaaaacctgatgctgagaagtgaagctcatgaaaagccatcctggaaggacagtaaaagaagtcatgcttcagggaggcagccaaaatggccgaataggaacagctccagtctacagctcccagcgtgagtgacgcagaagacgggtgatttctgcatttccatctgaggtactgggttcatctcactagggagtgccagacagtgggcacaggacagtgggtgcagcacactgtgcgcgacccgaagcagggcaagacattgcctcactcgggaagcgcaaggggtcagggagttccctttcccagtcaaagaaaggggtgacagacggcacctggaaaattgggtcactcccatcctaatactgcgcttttctgacgggcttaaaaaacggcgcaccaggagattatatcccacgcaaggctcggagggtcctacgcccacggaatctcgctgattgctagcacagcagtctgagatcaaactgcgaggcagcagcgaggctaggggaggggcgcccgccattgcccaggcttgcttaggtaaacaaagcagccaggaagctcaaactgggtggagcccaccacagcccaaggaggcctgcctgcctctgtaggctccacccctgggggcagggcacagataaacaaaaagacagcagtaacctctgcagacttaaatgtccctgtctgacagctttgaagagagcagtggttctcccagcaggcagctggagatctgagaacgggcagactgcctcctcaagtgggtccctgacccctgacccccgagcagcctaactgggaggcaacccccagtaggggcacactgacacctcacacggccaggtactcctctgagacaaaacttccaaaggaacgatcagacagcagcatttgccgttcacaaaaatccgctgttctgcagccaccactgctgatacccaggcaaacagggtctggagtggacctctagcaaactccaacagacctgcagctgagggtcctgtctgttagaaggaaaactaacaaacagaagggacatccacaccaaaaacccatctgtacatcaccatcatcaaagaccaaaagtagataaaaccacaaagatggggagaaaacagagcagaaaaactggaaaccctaaaaagcagagcacctctcctcctccaaaggaacgcagttcctcaccagcaatggaacgaagctggacggagaatgactttgatgagttgagagaagaaggcttcagacaatcaaactactccgagctacaggaggaaattcaaaccaaaggcaaagaagtaaaaaactttgaaaaaaatttagacgaatgtataactagaataaccaatacagagaagtgcttaaaggagctgatggagctgaaagccaaggctcgggaactacgtgaagaatacagaagcctcaggagccgatgtgatcaactggaagaaagggtatcagtgatggaagacgaaatgaatgaaatgaagcaagaagggaagtttagagaaaaaagaataaaaagatatgaacaaagcctccaagaaatatgggactatgtgaaaagaccaaatctacgtctgattggtgtacctgaaagtgacggggagaaaggaaccaagtgggaaaacactctacaggatattgtccaggagaacttccccaatctagcaaggcagaccaacattcagattcaggaaatacagagaacgcctcaaagatactcctcgagaagagcaactccaagacacataattgtcagattcaccaaagttgaaatgaaggaaaaaatgttaagggcagccagagagaaaggtcgggttacccacaaagggaagcccatcagactaacagcagatctctcggcagaaactctacaagccagaagagagtggggacaaatattcaacattcctaaagaaatgaattttcagcccataatttcatatccagccaaactaagcttcataagtgaaggagaaataaaatactttacagacaagcaaatgctgagagattttgtcaccaccaggcctgccctaaaagagctcctgaaggaagcactaaacatggaaaggaacaaccggtaccagccactgcaaaatcatgccaaattgtaaaaaccatcaaggctaggaagaaactccatcaactaacaagcaaaataaccagctaacatcataatgacgggatcaaattcacacataacaatattaactttaaatgtaaatggactgaatgctccaattaaaagacagactggcaaattggataaagagtcaagacccatcagtgtgctgtattcaggaaacccatctcatgggcacagacacacacaggctcaaaataaaagatggaggaaggtctaccaagcaaatggaaaacgaaaaaaggcaggggttgcaatcctagtctctgataaaacagactttaaaccaacaaagatcaaaagagacaaagaaggccattacataatggtaaagggatcaattcaacaagaagagctaactatcctaaatatatatgcacccaatacaggagcacccagattcataaagcaagtccttagtgacatacaaagagacttagactcccacacaataataatgggagactttaacaccccgctgtcaacattagacagatcaacgagacagaaagttaacaaggatacccaggaattgaactcagctctgcaccaagcgacctaatagacatctacagagctctccaccccaaatcaacagaatatacatttttttcagcaccacaccacacctattgcaaaattgaccacataattggaagtaaagctctcctcagcaaatgtaaaagaacagaaattataacaaactgtctctcagacctcagtgcaatcaaactagagctcaggattaagaaactcactcaaaaccgtgcaactacatggaaactgaacatcctgctcctgaatgactactgggtacataacgaaatgaaggcagaaataaagatgttctttgaaaccaacgagaacaaagacacaacataccagaatctctgggacacattcaaagcagtgtgtagagggaaatttatagcactaaatgcccacaagagaaagcaggaaagatccaaaattgacaccctaacatcacaattaaaagagctagaaaaacaagagcaaacacattcaaaacctagcagaaggcaagaaataactaaaatcagagcagaactgaaggaaatagagacacaaaaaacccttcaaaaaagtaatgaatccaggagctggttttttgaaaggatcaacaaaattgttagaccgctagcaagactaataaagaagaaaagagagaagaagcaaatagatgcaataaaaaatgataaaggggatatcaccaccaatcccacagaaatgcaaactaccatcagagaatactacaaacacctctacgcaaataaactagaaaatctagaagaaatggataaattcctcaacacatacaccctcccaagactaaaccaggaagaagttgaatctctgaatagaccaataacaggctctgaaattgtggcaataatcaatagcttaccaaccaaaaagagtccaggaccagatggattcacagccgaattctaccagaggtacaaggaggaactggtacgattctttctgaaactattccaatcaatacaaaaagagggaatcctccctaactcattttataaggccagcatcatcctgataccaaagccgggcagagacacaaccaaaaaggagaattttagaccaatatccttgatgaacattgatgcaaaaatcctcaataaaatactagcaaaccgaatccagcagcacatcaaaaagcttatccaccatgatcaagtgggcttcatccctgggatgcaaggctggttcaagatatgcaaatcaataaatgtactccagcatataaacagaaccaaagacaaaaaccaccatgattatctcaatatatgcagaaaaggcctttgacaaaattcaacaacacttcatgctaaaaactctcaataaattaggtattgatgggacgtatctccaaataataagagctatctatgacaaacccacagccaatatcatactgaatgggcaaaaactggaagcattccctttgaaaactggcacaagacagggatgccctctctcaccactcctattcaacatagtgttggaagttctggccagggcagttaggcaggagaaggaaataaagggtattcaattaggaaaagaggaagtcaaattgtccctgtttgcagatgacatgatagtatatctagaaaaccccatcgtgtcagcccaaaatctccttaagctgataagcaacttcagcaaagtctcaggatacaaaatcaatgtacaaaaatcacaagcattcttatacaccaatagcagacaaacagagagccaaatcatgagtgaactcccattcacagttgcttcaaagagaataaaatacctaggaatccaacttacaagggatgtgaaggaccgcttcaaggagaactacaaaccactgctcaatgaaataaaagaggatacaaagaaatggaagaacattccatgctcatgggtaggaagaatcaatatcgtgaaaatggccatactgtccaaggtaatttatagattcaatgccatccccatcaagctaccaatgagtttcttcacagaattggaaaacactactttaaagttcatatggaaccaaaaaagagcctgcatcgccaagtcagtcctaagccaaaagaacaaagctggaggcatcacgctacctgacttcaaactatactacaaggctacagtaaccaaagcagcatggtactggtaccaaaacagagatatagatcagcggaacagaacagagccctcagaaataacgccacatatctacaactatctgatctttgacaaacctgagaaaagcaagcaatggggaaaggattccctatttaataaatggtgctgggaaaactggctagccatatgtagaaagctgaaactggatcccttccttacaccttatacaaaaattaattcaagatggattaaagacttaaacattagacctaaaaccataaaaaccctagaagaaaacctaggcattaccattgaggacataggcatgggcaaggacttcatgtctaaaacaccaaaagcaatggcaacaaaagccaaaattgacaaatgggatctaattaaagagcttctgcacagcaaaagaaactaccatcagagtgaacaggcaacctgcaaaatgggtgaaaattttcgcaacctactcatctgacaaagggctaatatccagaatctacaatgaactccaacaaatttgcaagaaaaaaacaaccccatcaaaaagtgggcgaaggacatgaacagacacttctcaaaagaagacatttatgcagccaaaaaacacgtgaaaaaatgctcaccatcactggccatcaaagaaatgcaaatcaaaaccgcaatgagataccatctcacaccagttagaatggcaatcactaaaaagtcaggaagcaacaggtgctggagaggatgtggagaaacaggaacacttttacactgttggtgggaatgtaaactagttcaaccattgtggaagacagtgtggcaattcctcagggatctagaactagacataccatttgacccagccatcccattactgggtatatacccaaagaactataaatcatgctgctataaagacacatgcacacgtatgtttattgcggcactattcacaatagcaaagacttggaaccaacccaaatgtccaacaacgatagactggattaagaaaatgtggcacatatacaccatggaatactatgcagccataaaaaatgatgagttcatgtcctttgtagggacatggatgaaattggaaatcatcattctcagtaaactatcacaaggacagaaaaacaaacacctcatgttctcactcataggtgggaattgaacagtgagaacacatggacacaggaaggggaacctcacactctggggactggtggggggttgggggaggggggagggatagcattaggagatatacctaatgctacatgacgagttaatgggtgcagcacaccagcatggcaaatgtatacatacgtaacctgtacattgtgcacatgtaccctaaaacttaaagtataataataatgaaagacaaaaaagaagtcatgcttcctcttatatccaaatgccaacttggtaagaagggaggagataactgtagggaggggtagaaatttttatggattaaacagccaaagcaaagtgttttaaatcagaagatactgagatgcctttttaaatgacacggttgatttttttcctgtgatgatttgaaatagcgacttgtaactagaaacaagtttagaaaatacagttacttttttttgtttgtttgtttcatgccctggattgtggctgaccagtttatacctactgtgctggaaaagtttaaattataaattactgtcacagtctccgtagatactaaaatctctgatctataaaacctgtattgcatgagcaatactgtcattcctcctttttctataacagttattaaaggagaagaactatgctacgattcatgtgtatttactgagcatataaagcagtctatgcagttcgtacatacctctctctaaatgcattgaggaaaattatatctcttacgtaaatcatctaagactttctgaattttgttagatcctgccatttcttgttttacacaggaggctgccagctatcaactgattgaattgattacttcattaaagctagaaatacagatctgatgagttttgcaattaattgtatagaaagctgggcttggaaaaagaagaggatgcactgagtagcagagtagacctgatgctcagttaaacctaaactgctactggtacagcaagtcagacaagcagtctggaccttactcagggtcaggagaaagcggcaaatcagaacccaggaagagagtcagggaacattatggtatatacccattgaatttagatgatcaagagtttaagccagacagtaacctacagggctacagggcaataaagagtcacacgtaacaaatctttgttgtgaaatagacaaatatttcatgctatttcagaaactattcccagagttgagcagagtaaatctgcagttaggcagtgttaggtaagtgaaagaatcatgtgaggttaggactaaggcttcatcctgatgtcagcctgtggtggtacattctgacactaactgcagacaaatttctcaccttcatatgtttcctgaaaacttatcccgaatttatttttgttaattatctcatctcctcttatacccaagtgcattccttgactcaacttctcatctttcttttatgtatcccaaaaaagtttgctcctcatcagtgtcctttacactgtaaaatttttgcctgagagtattctcttttagaaaatcttctcatatcaattccaagtagttttaggtggaagcacagaaacactaaatctctgttgtcaatcaggttatgctaaattatgctgcataacaaacaacatcaaaatttcagttatttaacacaggtctccaacccctggtgccagtttatggacaaactgtcttctgaaaaactggtccctggtgccaaaaaggttgaggaccgctgatttaacccatcaaaagtttatttctcctcacacagatacactgtgtaactgggtgattctctggggtgactgacttcgtcttggtagtttagcaatccagactgctttgatcttgtggcaccatgattgctatggcagggaggggagattctgtagaaagtctcacactggcaattaaatgctttgacctggcttaagtatcattggccagaatagttgcatggtcttacttcactgcaaggagtggggaaatacaacccttgcatgggccggaaggaatgggatatcagaatggataagtacaaagtcactagtacaccttatttgggcagtgtaaggtttttgtggtgattattgatttctgagaagcaagaaattataatggtgtttgttaccgtaagtgctttttttaatctacccattgtctaataacctttaaaatatttcctaaagggcaggttatttactgaatcttgaggatgccagtgcctggagatatgtgtgtgtgtgtgtgagtgtgtatatgtatatctgcatacacataaatgagattatatccatagaaaatatttgattctttttcagttcttaatatctagcataacaggcaggtttagcatttttttaaataatcctactgtcttaaaatggtatgtggaattatgttcccaagaggatctgaagagtatgagggcatagccttcccattaaatccattaattctctatgggagctccatatcagcagcttctgtttccagaaaacagtaaatatattgaatggagagaccattaaaagaaatacagaaagcttagatgtatctctgaggggcgatttgaccccagcaacagtatctgactccttattatttataaacatacggtgtctacatttaggaaaaaattcttctgaaattggtaaatcttcgaagacggaaggaaatctatttaattttttttgacacaaggtctcacgctatcacccaggctggcatgcactggcacaatcacagctcactgcagcctcgacctcgtcaagcgtgatccttctacctcagccttccaggtagctgggactgcaggtgtgcaccaccatgcctggctaatttttttattttttatagagatggaatttcaccattttgcctgggctggtctcgagctcttgggcttgagtgatcagcctgccttggcctcccaaaatgctaggccaggcatgagccactgtgcctggcccagaaatctattttaaaaggaagaaaactgataggaggaccacttgaaaaaatatttatatgtactgtagttgccctttgtttttctgtcagggttttgaattagctatgttgaatgagagctctcagtcagcaactactgatttcatttcaacagagcaaacacaaacatactgaacttagattttagaaaaataactttgtgtatgatggttcacagaaccagtggtgatggttcacaatgatgcttaaaggttcatcaagccctgccaataaaattagtctgggaacatttaatatgtttgtcacaataaaatgttctatataacaaacctctttaaaggaagtggtggaaattagtttctaacagctgcatcaaatatcaataagtacgtttgcaaaaaactgagctgatagttgagacttttattttaggattgaaaaaaacaatctgagaattaaattcatatactggtctacaattataaattacaaataatttattatatggttaaaacaatcatgctttttattttgcttctacctcttttatttaaaaagtagctgtaagaataacagaactgaaattaagtatttaaatatctaaatatttcttgctatggaaagcaaaaaagctgatgtgctttaagttattgtgccattgtgcatgaactaacatgggttgttgagtgcttgcttatgtctaggcattgttacctatttattatgtgtagtatctcctttggtcctattattaccttgtcaaaattaacattcacatatatccagtaaattgaccaagggtacctagccacaaagtgttagaagcaaaatttgaatccacatgtatgttcttttcattatactgtttttgagatttggaatgggagtggcagagacaaggggatgatcatgaagcagccatgatctgatctcattgccgtttttgactattcaactattcaacatcatgaacattaccttttttcagattctttatttgctgcttttcatggactctggacaaatgactagttttttgtctttgcctgtgtttcttgtactctttcaggatcatttccctactctaatgatgttgctaaggggaatggcagagtgctggtcctgtcatctttattgctaacatctcctttgagaaatatggttctggcaggtttttagaatgtagatcaacaagataagagttgtactaggccttcataagcagtgaggactggagaaatcacctagattcctcaggccagatatgaatgggctagtgttagctcatagtacaaatttcttttctaaacaaaagactatctccttgttccttcttttggaattaaaagttgcttgtaaataactttttcataatctctataactggtgtctacagattttggaaacagctttaatggtagcatatttgaaatgatctttgatctattaaaaaaaatttgtagcacgtttagaaaccaacttaagatgcagaacttttctttttttgcctttctctggaaatttctaatgatatgtccttatctttgtgtaattcttagctgagcatggaggtgtttttattttttatataattaataattttattactcaggaaattatacttgcaccttgaggacaccttgaaaatttggaattccagtgtactcagacaggggagattcatgaaacatagataattgaatgaaatatgaactagctttctaattgaatgaaatatgaactagctttctaaactctgactgtaggatcacatccctgaattgttaagggtatggagaaaaatctctgagctgccaccagaaagccagtcctctctcttgatgccccaggagtgatctaggactctccccagtgttcaggttagtggttttacctgctggtctaattagttttccttggcagtcttcagttcttctttcagatcagaaatagtatccccaaatggaaaggccccataatagatgaatttttataaagggcctaagtatttgaatattactgtaagacatcattattatagcagagtgacacgatgttccaaagtattcccatagtcatccagaaaagttcagcatgtttatgctgtacagtaacaaaaagaagtgagtgctgtaacttagaaaaattcgttttaaaaaagtcagtgttaaaaaaaaagtgagtcctttctccctattaccttccttcctttgtgtaacaaagattaattttacttctgctgtgtgccagaacagtactgaatgctgtggatacaaagatgaataaaacatgttctttgtcctcaaagagcttgctatgtaattgttcaaatagacataagaaaataattagaatatgatgtagtattttgatggtagtgttcaaaatatttctggagagcatagaagaagagataataatgaaatcttcctgacatggtatgcgggggacctatcaggactagcttcaggttcatggtgaattttccagttaatacttcattttccagtggtgtcaaataaatgaggtacagctatatttttgaaagattacctgtttggcatttaacatcattcctctgggattttaccctgttttgaatggaaggtagcctttttgaaagaagatgagccacttttgtaaatttagtatgaaacattttgagctcctcaagaaatttctttataatttctaaataaatgggacctaattaaactaaaaagcttctgcacaccaaaagaaataatcagcagagtaaacagacaacccaccgagagaaaatattcacaaactatgcatttgataaaggactaaaatccagaatccacaaggaatgcaaacaaatcagcaagaaaaaaaaatcccatcaaaaagtgggcaaaggacatgaatagacatttcttaaaagaagatatacaaacagccaacaaaaatatgaagaaatgctcaacatcactgattatcgggaaaacgcaaattaaaaccacagtgagataccaccttactcctgtaagaatggccataatttaaaaataaaaaataatagatgttggtgtgaatgtggtgaaaagggagtccttttatactgcttctgggaatgtaaactagtacaaccactatggaaaacagtgtggagattccttaaagaactcaaagtagaactactatttgatccagcagttccattactgggtatctacccaaaggaaaataagtcattatgtgaaaaagacaacatgcacacacatgtttatagtagcacagtttataattgcaaagttatggaaccaagctaagtgcccgttgaccaatgagtggttaaagaaaatgtggtatatagacaccatggactactactcagccattaaaaggaatgaagtatgttctttgcagcaacttagatggagctggtggacattattctaagtgaagtaactcagaaatggaaaaccaaatattctatgttctcatttgtaagtggaagctaagctatgaggatgcaaaggcataagagtggtatggatgttggggactcaaggaaaggttgggagcagggtgagggatgagttgggtacagtgtacattactcagatggtgggtgcattgaaatctcagaaatcaccactaaggaacttatccatgtaaccaaaaactacttgcatccccaaaaactattcatataaaaataataaatacaataaaatacaaggtattattggatattctttagccatagaaccattttttagaaaatcatgtatttgaatgttgagtatagtacaagaccactatctgtataatcttatgtaatttaaaagttttaattgtatacatacttaatctcataaatagtgggtacatatctgagaataatttcataaaaaagctccttaaaacgaattcactttaaatcaaattcaggaagaaggggccaaaatggtgaactagtagcacctaatgtgcaccactctcatggagataaaacaaaagggctagttaaccctgaccctgtaggctgatgatctgagaaaccacattagggtccatcaaggcagcagggggacacagagagcagagaggaacaaagaagggcatcaatctatctgggctcagtgtggagccaggagaacctcccaaacatgggaaagaatgagtgagtgtgagcttcctgggggagcacatccccctgcgcttataggctgaagcagagagcccattttgtgtgggggcaactctcgagtccaaggagaccactttgagacttgggccctggagcagaccaacactggcaccatagcaccaatagaaccttcagtcatggggcctgggagcagtaagattacaccacttctgccctcctccctccatccctgctggatgaggcttggtgtcagcttctggcctagtggtcctgcttctgtctgaactcggacagaggtcctggcttgctattgtcccaggaaggacccagatggcagggtgggccaccctacccacccctgccacaggtagccaggcaagcaatgcctgctagagtttctggctcagtagtccagcttctgtgtgaacttaccaagagggtgcaacctccctttgtcctgggaaacacctggacaaaagggagagtgacctcaccccaaccctgtcacaggtagccaggtagcaatgcctgctagaacttctggcaaacagtcccacatctgtgagaactcaggaagaaggtgcagcctactgttgcttgtaaagtgtctagagagaaggggtaggtcacctacaaagggaaccccatcaggctaacagtgaaaacaggcttttcagcaaaagccctacaagtcagaagagattggggggtctatattcagcattcttaaagaaaagaaattccaaccaagaatttcatatttggcaaaactaagcttcataagagaaggagaaataagatccttttaagacaagcaaatgctaagagtatttgttaccaccagacttgctttacaagatgtcttgaagggagtgctagatatagaaaggaaagactgtgttaccaaccatcacaaaaacacatttaagaacgtagactagtaatgctataaagcagcaacacaatcaagtctgtgtgataaccagctaacaacatgatgatgaaatcagacctgcatataccaatattaaccttgaatgcaaacaggctgaaagccctaattaaaaggcacagaatgacagcttggataaagaagcaagatcgaactgtatcctctctacaggactcatctcacatgcaatgacactcataggctataagtaaagggatggagaaaaattgcccaagcaaatggaaaacagaaaaaaggaggggttggcattctactttctgacaaaatagacgttaaaccaccaatgatcagaaaacacaaagaaaggcattacgtaatggcaacaggccaaattcaacaagaagacttaattattctaaatatatatgtacccacccctggagcacccagactcataaacaagttcttacagacctatgaagagacttggatagccacacaatagtagtgagagagttcaacaacccactgacactattagaagatcatggggcagaaaactaacaaagatattcagaaccagagctcaacatttgaccaaacgggcctagtagacatctacagaactctctacccaaaacaacaagatatacattcttctcatctgcacatggcatgtactctaaaattgaccacacaattggccataagacgattctcagcaacttaaaaaaaaaaaaaacttaccaaacacactctcagaccaaagcacaataaaaatagaaatcaatactaagaaaattgctcaaaagcatacaattacatggaaattatataacctactcctgaatgacatttgggtaaacaatgaaattaaggcagaaaccaagtacaacataccagaatctctggggcacaactaaagcagtattaagagggaagtatatagcactaaacacccagagaaacggactaaaaagttaaaagttaaaaggatctcaagttaacctaacatcacacccagaggaaccagagaaatgagcaaaccaaccccagagctagcagaagacaacagataaccaaaatcagagctgaaatgaaggaaactgagatgtaaaaaaccatacaaaagatcaacaagtacagaaattgattctttgaaagaataaataagattgatatgccactagcgagactaatagagagagagacagaagatccaaataaacagaatcagaaatgacaaaggggacattaccaccaacccaacagaaatacaaaaaaaccccagagactactgtgaacacctctatgcatgcaaactagaaaatctgaaagaaatggataaatgcctggaaacatacgacctcccaagattgaaccaggaagaagttgaatccatgaacagacaaataatgaattataaaattgaatcagtaataaaaagcctgccaatcacaaaaatcccaggaccagacagattcacagccaaactactgaatgtgtaaggaaaagctggtactattcctactgaaactgctcctacaaattgaggtggagggaatcctctctaattcattctgtgaggctagcatcattatgataccaaaacctggcagagacacaacaaaaaagaaaatcttaggccaatattcctgatgaccatagaagcaaaagtccccaacaaaatactagcaagccaaattcagcagcacatcaaaaagttaatccactgtgatcaagtaagctttattcctgggatgcaaagttagttcagcatacacagatcaataaatgtgatttgccacaaaaacagaattataaacaaaatcacatgatcctctaaatagatgcaggaaaaaaagcttttgataaaattcaatatcccttcatgttaagaaccctcaacaaactaggcattgaagtaatgtacttcaaaataataagagccacctatgacaaacccacagcaaacatcatactgaatgggcaaaagctggaagcattccccttgagaaccggaacaaggcaaggatgccaactctcaccactcatacttaaccatagtactagaagtccgagccagagcaatcaggcaagagaagagcaatgccaagaggaagagaggaagtcaaactatttctgtttgcagatgatatggttctataactagaaaaccccatagccactgcccaaaagttcctagatctgataaacaacttcagtaaagtctcagaagacaaaatcagtgcacaaaaaccagtagcatttctatacaccaacatcatctaagctgagagccaaatcaagaacacaatcgcattcacaatagctacaaaaagaataaaatacttaggattgcagctaatctgggaggtgaaagatctctaaatgagaattacaaaacactgcccaaagacatcataggtgacacaaatggaagaacattccatgcccatagataggaagaatcaagattgtttaaaatggccataccacccaaagcagtctacagattcagtgccattcctatcaaactactgatgacattctccatagaattagaaaaattatttttaaattcgtatggaaccaaaaaagagcctgaatagccaaagcagtcctaagcaaaaagaacaaggttggaggcatcacattacccaacttcaaactatattacaaggctacgataaccaaaaaagcacaatagtggtacaaaaagagacacacagaccaatgagactgaatagagagctcagaaataatgccagacatctacaatcatctgatctttgacaaagtcgacaaaaacaagctatggggaaaggactttctatataataagtggtgctgtgataactggctagcaatttgcagtagattgaaacgaaccattagagaaatgcaaatcaaaaccacagtgagataccatctcacaccagtcagaatggccattattaaaaagtaaaaaataatagatgctgttgaggttgtggagaaaagggaacacttatacactgctggtgtgtgtaaattagtttagccattgtggaaagtagtgtggcaatttcttgaagaacttaaaacagaaataccattcaacccagcaatccctttattgggtatatacctgaaggaatataaatcattctccacaaagacgcatgtgtgtgctcatcacagcactattcacgatagcaaagtcttggaatcaacctaaatacccatcagtggtagaccagataatgcagtatggatataccatggaatactatgcagccattaaaaaagaatgagatccttcgctttgcaacaacattgatggagctgaaagccatgatgccccatgttctctcttacaggtcagaggtaaacattgagtacacatgcacacaaataagggtacaacagacaccagagcctcctagggtggagggtgggaggagggaggggattgaaaaactgcctgttgggtactatgcttattacctgggtgacaaaataatctgtataccaaacccctgtgacatgcaatttacctgtataacaaacctgcacgtgtacctctgaacctaaaagttaaaaaaaagaagaaaaaaataccctgggatcagacatttagagtaaattgtgaaaaattacactaaaacttagacatataagttgattttagttcaattaagaaaatttgtataacagaaactatgttctaattatagaagaacaatgaaaattagtgtttattggtattttttgtatgtacaatagcacataatttttacaaaaaaatagtaaattgcttctatcagtttttctaagggactctcttagtccttggcagacaagtcattctgaagaatttatcctgtcattatcctttttgattttctcatcagggcctttgaatgtgatcctgcagttctccatcatccctttaatggatttcatgaaatcttttaagtgattttcagtttcattataaaatggaattaatttgccctgtgtttgttgacaaaccaatctttatgatagaatggctgtgatatatttggtttacaatccagtttcttggtattagaaactctgaagtgatgtctttttgtttgcttatgagttgactgatggctggcagcatctaggtagcttcatgatgggggctggtcactggaaaaaccaaggcaggattagaggggtggggctgaaagtcacaccaacatctgtgctgaaagttaatttgatcaccaatggccagtggtttaatcaatcatgcttatgttatgaaacctccataataactcgaagggtttggagaactgcttgatgactgatcacgcagagggtggtatgcccaggaaaggcatggaagctctgtgccccttccccccataccttgccctatgcatgtcttcatctatatcccttgcagtatctatgtggaagtaagcttaagtatttgtgtgagttccgtgatttcgttcgggcagattaattgaacccaaagacagggttgcagaaaccctaactggaagccagtgggcagacgttctggagacccagacttgtgactgttgtgcaaaggcggaggggtgggagggcagtcttgtggactgagccctcactttgtgggatctgaaactacctccagttaggtagtgtcagaattgaattggaggacacccagctggtgtccactgcagaattgattgcttgcttgttgtgtggggaaaactcttcacacatttgctcacagaaatcttctgtgttgatttttgttgtggtgtgagagcagaggaactgtggttttccgtacacagaatggtcgatacacatatagatatttggctttggtctaattttgtaagtggtcatttaattagcattttcattttgtgatggcatttgatttcctatgtactgtgtttttttcaaactagtatacatcaatattttttaacacaacatttcatttactcttaattatttatattatgtatagttctcacttcataaaaattataatcctaatttagaaaccaggtagattgtgaaatggcaaagttgatgatgatggctcctccaatgacagtgataatagctgccatttgtaaagcttctactctatgccagctgctgtactaggtagtttaataatccttcccacaacctcaaaagattgatgttaatcacctgacttcatggataaagaaattcaggaaattcgtagaggcaatgagtgtcttacaagttaaaaacaagccattataatgatcaagtttgtgtttttttccaaaacactatgtctttctttggtttatagaagcatttacttcagggttttctctataaattaattatatttttggtacatataatataaagttgataaaaattggaatagcccacagttgtaggaatacttttctatgttattatttctatctgtattattaatgcagtgggtgttaatcttataaaaattattttttccttttgctttttttgttgagaggtatttcacaaatactccttcttcagcagatttgaatcaaaatggaatggaagatgtggaatttatgaaattggattttcacaacaaaaaagtcataaaatatactgtaatgttttaaaaatggcttgactgtacatccatttctaatagtttattttcaaagagaatggtgtaccatttcccaatgacttcttaatggaaaccagtgattgccattggaattgcagttattttacagtgtgtgtgtttatataaaccattactctaaaatatcaggttgcagctttggtatgtgaatgaattgaaatgaacgaaatttagatattttactgttttttatagctgcagaaactggaattgcagatactagtcttgatttagcctatggtgaattttcagttatttgaaagttttatttctcattcaaagagtagcttttatcatggcctttggtcagagatgctgtttgtattgttaaaataaaaatctcttcaatatcaaatagtatataaggaaggaatccagaattagcctgttaggcacacacagctttgtggtcccaggaataatggcattcttgaatagtaactcctgagatcagtaaaacttcagaagttattgctttattgtcatttttttactgtttgtcctctaacatgtgtgattaataatacatttctcatgtatagccataatgtgccattgagttttggatcttttgattacttgtattctctcctaagacaaataatgggattgcattcttaaagctaccagtttcttgcaggttattatttgacatgcatattacatttttggtacagctcatttccagggacttgctctgttgctatttctcactcagcatgtttcagaactaccaaacctgctgaggcattaagcatactctttgtatatgctcttaggaatatgggaattgcccatatcgaagccagtcatccagccatcatgtgtgattttctgctttgaacacatttttgtcttgtgttagaggtaagcattaaggtcctatgagtctcctacttcagcagtcatatacagaagatagaaacttaattttgattgcatccagtgatgtttttatataccctgaaagcatgatgttttataattctggtctagtgtgtttgcagttttgtttttatttatatgtatctctaaacctaaaacaagtttttatagaggaaattttaggtaaattttgtataattttttaaaagttgtcagaaatctttattttacatctgttccccctttagatactaatatccccatgtgggaaatggaaaatgtaagttctccatgctgttgtaagggctgtaaacatttctcaaaagctatatcaacgcagtcaccagaacatgtttctgctctgttgcatgtttgtttccccatccttttaccattgttgcattttgtttttagtggccctaagaagcctgcttctttaattttttttctttaatcctgtctacattctttgttaaacttttggtctttgtcacttctagattactttactaccatagatttccctttctgtctttaagtttgttattttgaatcactttcaactttttctgtgacacactagtgaggaactgttcagagtgaattcactaggtggctagcatcttagagtcaaaacataaaatgttgaaattgattaactagagatagtaatgtcaatttttaagtaattaaacattgtctagtttagaacaaagtaaaccccattatagaagtgggaatttaggaagagggaatgccctgttgttatatagcctttctgtataaaatattataggaaatatagaatcagatttatggtagttaagaactttctaaatgaattttagtatattttcacaggaatgatgtgaaaagaagaatggatgaatgttatctgtgaaatggtgagaaaagaaggaactgtgagaattgtgttttgttatttaaggacctgtgaaggagatggaggagatcataagttccaccagtggtggagctagatctcctggattcatttgaatagaaaaagagaggatatgttgtgttctgtagatgaaggctatcaaaggacacctcaatggaagatcccaggaggaaggtgataaacaaatggaaggtagacttgagtgtagctttcttctgaaatgggaagagagtagaagtaaaagcagaaaagaaaaatgaggctgttgcttataaaacttgaaaacgtttaaaagattgggtagtagttagagtctgagtaactaacattttaataaataatagaatctataaccaattgtgtacttttttattttaaaaaatttttttaatagaaatggggttttgctccattgcctaggcttgagtgcagtgacacaatcatggctcactgcagcctaaacctcctgggctcaagtgatcctcccatttcagcatcccaagtagctaggagtacagctgcatgccaccgcacctggctaatttttaaattttttgtagagatggtagtctcactgtgttgcccaggctggtcttgaactccagacctcaggtaatcctcccacctcagcctcccaaaatgctgagattacaggtgtgagccaccctgtccagcctgttaacatatttttaatagatgtttttgagttattaaatacccataccctgcagcattgtggatattttatgttttctcactcagtgtcactgattggttctttatagtctctgaattaaatatattttcaaagtagcatgttttctaccaagcgaggtattttattgttatttaattattgacatccttgaaataagagtggctttgtatttaagaggtatatgagggaacacagctgaaaaacaagagcatttttgttagaaatatattggggataggtgctggggtgggagggagactcactaagccagcaattttcaaaagttacagtagtatatataaaatttgaagttaattgagaataactagagaatgaaaccttctgaataataatagagatagttttgggaggcaggaagggaatgtctttggttgcgataatgtttattgctttgatctaagtgctgattacatgggtgtatttctgtcttaaaagtcattgagactgggcaccgtggcttatgtctgtaatcccagcactttgggaggccaaggcgggtggatcatttgaggtcaggagttcaagaccagcctgcccaacatggtgaaatcctgtctctactaaaaatataaaaattagccggctgtggtggtggacacctgtaatcccagctactcaggaggctgaggcaggagaatcgcttgaaccctggaaatggaggttgcagtgagccgagatcacgccactgcactccagcctgggttacgagtgagactccgcctcaaaaaaacaaaaaagaaaaaagtcattgagctgtataaaatataaataaaacttaatgtttatacattttgctgtatgtaaattatatctcaattcttaatgcaggaaaaagcacactcctaatgggtacttcagactgggatttttaaaaaatttctgttttgtttactaagtgtactggatatacgtctagtatcatctttaatgttactttaaaaatattctttaaagtgataccactggaagaaaaactagccaatttatttcacttataactgtcatgagctgaaatttcccaacactgacctctgtttcagattcctgctgttgcctctgcactattagttggtgtcagcagggggttagcagcactcaatttaaccttgctatttgtattctgttttgaatttttttcttttctcatttaacttccttacatggattctccattttaaagattgtgcatgcaccatggggtctgtacagtgaaagactgtagtacagataagcatacaatagaagcacatttaaagataatgtgaagctgcttttcttttttttcttgaatagaggcattgctgtgaaaatcattaaacaagagaaaaattaagcctactcatgctgttatttttccgttaagattatagaccagtttaaaatatataagaactatatagatatggattaattatacattttatgtccatttagaggggcatctctgtgactgttgtgcttgtagctagccatggacagagacttattggaccagaagtacttcttttgtctctcccacattaaaattttagaatctgttatgactgagaccacatccactattcttatttcaatgtgccccctctcattgatccctctactcccttcttggaccttttatcttataaatgctgggaccttcctattcaaagcagtcttctacagcaggataggaagtcatgggtaattaaagaggggcctctaaactccagacccttcctcctcaactccccatggaaactgtctcccctgaacagtgctttgtagaatcctagtgaacttaaagactcactactcttatgagtggtctttatctttctctgagtgggttctaagtaaaacaccaggttggtggaaatggaaaggaaggacggctggctcaaattctggagatactatatgaaaaggaataatgagacactcactgtcctgtggggtaagcaggaaggaaagcctagcttcccattccacagcctccaattccattcatttccagccactgctttgtacagctccagcacactcctctcctggtctgtagttcaagattccactagtttcatctccaggtgccaaagacactctgcttggtgcctaagacaccaaagtgaaaacaacagccatggaaaacacttccagttaagttgagggagaccgagatttcactatgtatagcagggagacttgcattcctgttagctcaaacagattctgaaggcatttctccagagatgccttgcttaggtgaatggggagtgtaataacccaggtattgtattttaatattataatagtctactcttatgctagggtgacatacatcctggcttgtactggatgtatgtcaccatcctggcataattgttgttagtaaattgcttccccttttattccccagaagtttggatggtaaattatatggtcactatacacataacaaaaatggacttctcagtccatgggaattgtgtaacaaaagccccaaatgtaaacatatgtcattaagtaaagttaaaatgatagtgatggtgtttaaaaatatcgtaaatgcaaatgtttattaaatgttctaaaaatcaaaacaaaaaacctcttttgtcagggattcttgttactatgatataattcctacaggatgcttaatagcactgcccacacaatggatgtgaaataaccacctaatattttaaaatattaagtcaaaatataatggtataaaatctttataatagaatacttaaacgtttcaattaggaatttcagcttaataaaattacatgtttaaatttgtcgtattcccagctcttttaaattaaagaaccaatcatgggccttcattttgaacattgttttaaaatcatgttaaatgtagaaaacaaataatgattaaaaacagagatattggttttaggagataagtgtttcacatttattatttaccttttttaaaagacagattatgtaaattattcttcaaatttaaatgtataggtataaaattgaataaataaaacaagttttagtaagaaaactattttcagacttaatactaaccaactattgctaatatactataaaatgctacttaggcaggttatagactccaattattatagttaatggcctcagtggcctcaccttgccttaatctaggacataaagcatgcagaactcgtaatttaattatcacctgttaatattggctctaaattcatgtctcccctttcgggatgaaactgcagtgatgagccaattaaaaatcattatcttcctactgaaaacaccagcctgctaactacaccacagtatacaaatctgctgagactttcaagaagaaacttactgcctcttacctttagggagtgctgaattaaattattttcggccatttataattctaatattttgttttaattatttatttttttgagatagggcctgtgttgcccatgctagtctcaaactcctgatctcatgcaatccttctgtctcaggctcccaagtaactgggattacaggtgctcacaaatctaatttttcacatctctagattatatgaagattgtattttttaattattacataccttaaaagccatgagagaagtggagagttatgttattctatagtaataaatggcagaaatgaaatctgtgcttttattcgtatttacatatcatgagatataaaaaaaaaatcagagaatgtggtgctataaaagggttgttagcttataaaatcccattgatatgtactagagaaatgtgcagttgatttacaggaatttattagaaactttgctctttgtgtactctcctgacattgtgtactcttgtactgaaatctaattttataattgacccatgggaatcaaactctggaaaattgatttgtgctaaccaaactcacaagagattgatttataaactagtaaatcactttttaacttactatgagaatgctacctgatccaaaaacctgaaaaatttatggtgtgtttttgagttttcgctactctcagttcaggcactatagtgaataaagaggtgaaaaacacttagtcctcatcctcaatgaatttataatctggcgagaagacttggacagcaatacatagagtacaagtcagactacaataaatgagtgagtgatatgttgtggttaaatgtttagtagaggttttttgtttctgctaggcatactcttgtagttgggaaaccaaattatacttcagtggatatgttttaagagatatttctttcaagccattattggataataaattaactttcccttttctctgcatgtttctatataaagaatcaggaccaacagcccataattaggacacctttgctcttgaatatgctctagacactacaaaattttttaaacccttaacaagtgcagatacatgaaaagttcactcttgttgcagttattacaccagaatctttccttctgtactgtagattaattctaaagttagtgcataaggcaaaaattaaattatatgtagccaaagtgctctaaaaatttcataaatggcttatagaatacatactggttttgtaaaactgctcagtaatatacaagtataatgtttggtaaatcatgatatataataaagcatacataatccaaacaattttaaagtattctaattgcagtattttaaaggagttgtttatacaaaggaatcttaataaattaaatgtatgtgccatgtatatcctctgtcatcatactcaagtttgtagttttcttccattgagtagatttcaggtgggccactatctaacagtatatattgggatacttacctgttaaaatacaagatagattgtgttgcttttgaggagcttttctatagccagcctgttttagactttttgcgtggatttgttttgtgtggtagaagtaaggagatgatcaaggtatgatttcatgaatcacatagtttattgccatacaaagagaattttttccttaggttcctagtgcgtaaagaaggggagaataacgtgaacagatctcacagggagtatacttgataggtaagatacgtgaaccacaaagtgagtaagttccaaaattattaaaggcgttgcccaattaggatggaagccgtcttctgtggaaaatagtctaattaaagattgaggtgtacctttttacaacctttgtaccatagaggtcaagcctatagagaaactggcttgaccaatacagtggagatctgttaccacaggtaaggtccctcaaggctgagggtggtgccagtagtggcaggcaaggcttcagagattagctggaatgatgttgccctgtggcaatgtcacagcatgtcctcttggtctttggagaacatgtagcttgccacagtctgaactctcaaagtgtctgtcaaactcttagttttatatgtattttgaagtccagtagttgaggtcagcaactcacatatgagttctgataaggtgtgatgtgacattcgcaaggggaggggtaccactgtcacattctctaggggatgagggagaaaacactccagcttcttcttatagcagaacataaatcattcacatagcaaactatgtaagtgtttggaatcatttcacagcaacataacaggattcttactagtctcaggcatccttcctagatttggatgttagtcatacttttctctaattactatattcacccaaacatacatgcagctgactggcattgggtccgtgttctgtttctgaccatggatagcttaccaacctacaaggaaatcaagcccctgacttggctgttatttgcactgtactccatcagctgagcctcagaactcatctacctgaaaaagtgataaaattgtctcatttagcaagcacactgaagcaagactagctgtgttcagcctgcatctaaaagtgtgttactctgtgacttggctcactgtaatagtaattttgaggtaattattaatgatagtgtttatggtactaactggtgcctgatcattttcacaataaggttggtattatttccatttttaggagatcaaagtttgcaggatttgcaaaagccttgatttgaaagccagtggcagagccaggccagaatgatggttttccccatctaaagtcagtcagtggtctgcttatctatgagatcatggccattataccaaatattgggaggacctggtgaaagatgcttttaggatctggcatcgaaaatgtagagctcatgctctggaatccaagagttgtaagaatttccctgttctccttaagggctgggtgactttcagcaagttactttaaacttttcaagcctcagtttatcccccttagggattttctgatagttaaatgaaataataggtaaagtgcttagcacagaacctgatatatgataagagcttagtaaatattatttgttttttaatcttgatatttagaatttcaagttttcaacagcttttatgtacatctcttatgtacatgtgtattgccaaatgaaagcctgtttttcttcctaaaaatgactagatattatataactctataggtaatgttcttatgagggcacacataatcaccaccactcacaatacctagttttggaatcttaattattccttccataatattttcttaatctgctataatgtgagatatatgactacagctgagagatattaaaagcagaacaggaaaccacagaagtttcttaaaataaaaatacaaactgagctcagaaacatgatttttatatacatatctgaaaaagaaatgtagccagtgagcagaatatactcaaagccaaccacaaataagcagtaaaaaaaaaaaaaaaaaaaaaaaatactgcagtttattttaaaattgtacacatcttgctttcattagagtatataggaatttcattataaaatacatttttaaaaatttaaaggtacatatgtgctttgactgaataattctgtgatgttgattatactctaaagtatacatgtgaagctagagttgaatatgaggtgctgccttgttcttccagactgtaatagcgtgtatgctatgtggccaaaccctgtcctctgcagagaccagcaagtcaaacccatgtttctcagagcttggttacatgagctcttggtagcacatgtacctatatgtaaaatatttatagatagctctcaatttttaaaaagtaatgtacagtaaattttatgatcaccttctaattgcaagtgaattggcttctgtttttgaattgacagcttccctttgaaattcatttacttatgcttttttaaaaagtgtgttgattttaaaaatcagcatgaaaactagtatgaggatagggagaaagtacaaatgttacactcagctgactgaagttttggggactctgaactaaacagaactgtatagttgatattttaacttaaaatattacctgtttggcctacctaatttttacttgagagaaaaataacattaatacctattttctttgtcaaatctctataacaccctttaattactacatttttagtagcagtgatttgctgacatttgtgcaacccctatgttgtgatccatatacttctcagtgactgaagtattttctttaaaattagtcctgctatatgtttatgtaaatctttgggagagggatttcttttcaaaatgctgtttgactgtcttgtgagattgaatgtctgtgatcaaagtactgaaaaatttaaaatacataattatgaagtagctcctcacatctgaagaaatgttccacagagattccaccatgtttcttcaagattatgtatttatttatttttttattttatttttttttattatactttaagttttagggtacatgtgcacattgtgcaggttagttacatatgtatacatgtgccatgctggtgcgctgcacccactaactcgtcatctagcattaggtatatcccccgatgctatccctcccccctcccccgaccccacaacagtccccagagtatgatattccccttcctgtgtccatgtgatctcattgttcaattcccacctatgagtgagaatatgcggtgtttggttttttgttcttgcgatagtttactgagaatgatgatttccagtttcatccatgtccctacaaaggacatgaactcatcattttttatggctgcatagtattccatggtgtatatgtgccacattttcttaatccagtctatcattgttggacatttgggttggttccaagattatgtatttattgagttctaattttctctcggacatggtactaagacatggtgtgatgggagagagagatgttagaaagacacctctctgaggaggtgacctttacgttgaaattctgaagaaagtagggcaggtaagctctaagtagaaggaaaatatgcaaagacctagggcagaaaggagtttggtccgttagacaaactcagagtaatcctgtgcagtgggagcttagtgaatgaagggaagagaagtgagagataagtttggaaaagtgagaaggaatcagtggggcagtctttctcccagatactgtcactttatcataaattaacttagtgaaactacactagagctaaaactgttactttaccttgaatataaagggagaaaatgctaagaacatttgattactgtaaaaaaaaaaaaaaaaaaccctgaaattgcgaacttctctattggaaatttaaaaaaaatcattttgttgaaattgctatactcttgtggtagtgactaaccatcactaccatcccatttcttctttattaaaaaaaaaattatttttctagagacagggtcttgctctgtcactcaggcaggagggcagtggtgcagtcctagctcactgcagcctggagctctagggctcaagcgatttttctgagcagctaggactacaggcacatgccgtgactacaggcgtgtgccgctatgcccagctgatttttaaattttttgtagagactaggttttgctatgttgctcaggctggtcttgaactctttgcctcaagtgatcctcccgcctccacctgccagtgctgggattatagacgtgagccaccggtgcccagcctcactttcttctttagcaggcctccctgccctataccttctgctcatatttaatgcataggccctacagtcagatgaaatcttcctgggaattgatttccctgaccttaattttctatagtcctgtttttacctttcgtgttctgtgcccagctctgttggaatgcttatgcacctactatcagtgactttgatctggctggaggggttctaagtccatatgctcccccttgatttagaattggattctctagtactctgtatttcaggtacagtgtaggttaagtgatttttttttgagctgccatgagatttaagcactttatgtaaaacaatttaattaggtaagtgaattccaagctctaagcactaaggtaggtagaccaagttttgaaacataactagtttataatttgggaaccgtttgagttaaactgtattttcatcttcagtagtcttgttctgtgcctcattgttagggtccacagtattgccattgatagtgttgttaatgaatagaatcttcatgcctcctgttctcctgactggaaagggcactttatttaattcttcttttctaatgaagacttttagataatcttcttataaatctgccttttgatattttttgtttttattttcccacagtatacacaatctgaagatcatattttcatctgtcttgtataggcttagaataaagttaaggtatagattagctctggattcaaatcagatggtcaggtaagatctctttctgggaaactgtggtaagaatgtgtagaaaaatattcctggcaacaaagttagaaaaactatccaaaattccaataaatctataattttcactgtccatggagaagaaaaaaatgtcatttgatcatatggcattagtttatgaagtgtctcagaagaaggtaagttatgggtattttttcaagtatgtataggatttaatttgtttaggaaaaagcactctaaggtaatgggtgtgtgttagtcattctgtaagagctccgcattattactctgctggacctgtctgccagtaccccggctagctgaaattcaggcacatggagcatcacttatccccctgaattatgttaatattaggaagggacaaattacttaataaaagatactgtataacattttatgaatatcatttagaagtaactgctgataactttttctgtcaatgagaattactgttctttataattgtgagtctcaaattttatctatgttgacttagatgaaaataaaggagttttcttgtttgggcatggtgttgattatgttaacaatatattgttagatgctgtttcccagtgtttgaggctgctttgccccggagagtggagaaggatgtagactgagaaggtgggaggcggaatggctgcttactgtggggtctcacaaaattctgttagttggtcttcatgatctaaagattcttctccattcccccgctactttcccatccaggggattattctcgcaacccactttttaaaacagttgtttcaatttgagaagttgttaattttacttatgattgtcagtttatgattattttattaggtatattttatgaaatatcaacaaactaaggtgatttacactactcttcataattacgaatactttaatttttttttttttttttttttgagacgaagtctcgctctgtagcccaggctggagtgcagtggcgcaatctcggctcaccgcagccaccacctatcgggttcaagcgattctcctgcctcagcctccagagtagctgggattacaggtgtgtgctactgcacctggctaatttttgtatttttagtacagagggggttttaccatgttggccaggctggtcttgaactcccaacctcgggtaatccgcccacctcagcctccgaaagtgctaggattatggggataagccaccgtgcccggccttactttaaaatcttaaacactggttttactatatgagcgtattaatggcatatttgggagagaagttgatattcatattttaaaataactccaaatttttatcttgagcgaagtagtattcactatacataatttattattttacattttctattcctaaccaaattagacattttaaaaaactctgaaaaatcacagctttgcttgtggactccattttgtgtagataattaagatccatggtttgaataccatttaggcttatcaatacaaggaaatattactccttaaacaaataactgttgtaagattgtgtctttttctgtagtttcttaatacatttaaaaacatgtgcaaaggaccagacatgaagggaatgacagtttttaaaaatcaaattgtgaaaaggttagttttttttttgtaccaaggaggtaagagtcaggaggaataaacaggtgtaaactgtaaagagcattgtaatgtacgttaaggagctttaactgaagtctaagaagagtagttgaacacttttaataagagtaacattttccagttgagttttaggaagtactggcagaaattgaataatgagtttaaaggaagaaaagtaaaagtaggaagaacagttagaatgttactgtattaatgtgggtgataattgattggatgttgttgtaggggtcagggactcagggttttaacttagtccatgtgtggataacacagttttttttttcttttttgaagtatattgcagtataaattcagctgtggacatactggatttaagttgtctaagactgatgtagaaatgttcagtgagcagttgaacacatacattagcaaaccttgaggaaaatctggcttgggaatatagatttggaatctagcaaatgatgattaaatttagagaagtagacgaaatcaacaactatatagaatgaaatagaagccgattgacttttaagagatgagcattttatccccctttttttttttctgtttaactggtaagcattgcagtggcactgcatacctttttcaatgcagatgtatattattttaggcatattatggattaaattggcatctgtcggccactctgtaaacctaattattatttatttatttggaaaagatactgaggttttttttgttttgttttgttttacaagtgttggggtgtaacttgcttgtaaatttggagcctggcaatatctgaaaatatattttcttctagagccctgcttagctcagtttttccctttctctgaagcttgatgatatatacttaatgctgtagaacttttaaactaagttattctttgttattgtaccaatatgatttttttttaggctgctgaatagggaaatagtatatccatcaatgaaatgcattatttctttaaaaaaaaaaaaggaaaaatttcagtttcatgccatataaaactattaataaattaacctcacaatttatctaagcccttaacgtgctcaaagtgatggtttgtgttttgttttgttttgtatttttggagattgctctgtgtcctgggctggggtacagtgatgcaaccatagctcactgtaaccttaaactcctgggctcaagcaatccttccaccttagccaccaaagtggttagaactacaggcatgcaccaccacacccagctaagttttttgtttgtttttggagacagggtctcactgtgtcacccagactggagtatagtgtcacgagcatggctcactacagcctcgacctcctgggctcaaccagtcctcctgcctcagcctcccgagtagctgggactacaaggcatgttctgccacacccagctaatttttgtattttctgtagagttggggtttctccatgtttcccaggctggtctccaactcctggtctcaagcagtcttgccaccccagccttcaaaagtgctgggattacaggtgtgagccactgcgcctgaccttgaagtcttacactaaaaaagggagcaacatttctaccctggaaaatttgctctttggacatttgatgtaatttttattcttatttatttatttttgagatggactctcactctgtcacccaggctggagtgcagtggtgcgatcttggctcactgcaacctccacctctggggttcaagcaattctcttgcttcagcctcccgagtagctgggactacaggcacatgccagcacgcctggctaatttttgtatttttattagagacggggtttcaccatattggccaggctggtcttgaactcctgacctcgtgatccgcccacctcggcgtccaaaagtgctgggattacaggcgtgagccaccacacctggcccctggatgtaatttttaaaaccagactcatttcaaattctgtcttagtgtaatttagatttttgtgtcttgacaataatgaaaaatatttcttctttttttttctttttgagatagagtctcactttgttgcccagtctgattgcggtggcatgatctcagctcactgcaacctccatcccccaggttcaagtgattctcctgcctcagcctcccaagtagctgggaccacgggcgcacactaccacacctggccaatgaaaaatacttctaatgatggttgttaactgctttaaagaaataatttaatactttttatgatgtttgtattacattgtcctttgatttgagttgcaactgttatttacaccttctttccctgtttgcaagcgattgttttaggatcatgttcttttcagtggttttgctgtaaaggaatcacttcatttctgattattgcatttacaaaaatgattgtttcttgtcttccttgaactgtgttttatcatttgatgctgtgattcactgtgctcctaaaacatttccatctgcctgttttgtgatctttctattttagatcaccatgccacagctgcttggatagccttctgtcacctattttcaatagtgtcatatagcatcccgcatggtttcaaggatggtaaattggctagactccagggcttgctctgtaatcctgccttgtctgttaatgtcaggtgtatctcacagctgatgctgatgaaactgcttaaagaaatcagatatgatctttagcagagccaaatctcatttccatatgtgggtttaagttctgttttgatcagcttcttgagggcagagtcctcaaagtcctacatcatggaatgcaagattgtgtggtagagacaaaagtcgtagtaatttagaaaaaccatcagcttcttgtactggcttctcacagattgttgcacttgagcacattacatctgtatgctggatgaataggaagtttttcaataaaggaggacattccaaaaataggtaacagcttagcctgatacataagtggtagctgctattattgtcatcattttgtttttattattatgattgtgagaactggataaattgggaaggaaagtaaaacaaactaaattttttcaacttatttgatgcaaagctagttctaaaatcgaatagaattacaaacatttattagtgtggatcatgtctgaatgctcaggctatttatctctttaacactatttcatataagtagttgtctttaataattgtagaatgtcttagcctgtttggaatgccgtaacaaaataccataaactgggtggcttataaacaacagaaatttctttctcatttttctggaggctgggaagtccaagattgaggcactggcagatttggtgtctagtgagggtccccttccttgtttatagaacagcaccctctccgtggctcctcacagggtggaaggggcaaccaagctgcctcaagcttcttttctaagggatcctgacctcattacctcccaaaggccccacctccgaatgcaatcaggttgggggttaagatctcaacatatgaatttagcggggacacgaacattcggaccatagcagaaagtatccgtaaaggaataagaatgattacaggtagttcggttcttaaaaggcgtgagtttattctgtagatgaataataaaactgtttgtctaattggtattaccaaaccagaacaattcagctattatatttattttcatggatttatttaaatgtataatgagtttttaatatgagacaagcatattgaagtgaatttttacatattaagagccatcgtcacattattgtttgacagatactgcttttgaaagtaagctaatcagttcatttttgtcaagtattttatatactcagagtagggagtagaattttgaatttgaagtagaatgactgttttcctctgtcaatacatatggcttatattttagatttgctggccattcagttttcatacattgtgacctgttgtcagaacccatatcttcatacttggatcagaaaatacaattcctgttaatagtggtccctgctgcctgaccttctgatcagttacagtttacccaagttgctgaattagaaagcattttaaagtacctgctatttgaaaagtacctataaaggattatgaaaaagaactctatttgaggctaatatctacaaagactttctgatttcagggtaggagtagagttcaaaatgaagcaaagtttaagacgcacatatgcagatgctattagcagtacttgtttctgggaagactaaatgtagtattcctattcctgatggtttaaatagactggttatagatttctgtggttacagggcagacgttgtaatagaggctatgagattttcttcacataaagcactaagtactatttctttctttgtatttattctttagttcttttcaaaaggtgaattggattagattttgcttctatctcaggtaaatcccctactttcaacctctgcaaatttgctactcttttattgtgtctgtaaaaaccaaccttgcatgaattgtgtcccttaagtgctatgattgtgattcccttttttatctataggacacagttttctcatgtttgtcttttcttgtcatggccttttttaagtgaaatgacatatcagaaaagatcatgatgaggccccaaaatagtctggcaattttgtataaaattagtccctgttatcaatggctcatgtttctctctttctttaccatctttaattatttgtgtgtgtgtttttgctgttaggtattgttttaagcactcaaccgttgaagtgtaggtatgaagtgcctgacaggccattgaaaataaacgaagataaattacagttgtagcagaggtttcagtccttgttattcttgatatgataccctcattgtctctggcgaattcctgtagacctttaaagtggcttgtcaaattgcttaacagaattagactttttctctaatgctgctagtggggtcacatctagaattgtctttcaatgtgatctaaaaataacatactgcaaaattacagaagagacatttggatgaaaacaaccaaatgactgagaggaatagccattaaagaggacaaaaaaattcctgaaaaactgaaacttagtttcaagcaaatggaattgggccttatgctgctttttccaaaacacctgataattctcagctacctaagaaaaattaccaaacctttttcaaagaaattaaggtctgtgctgcaatactgttctttgcagtattggctcataatcacattagggagtaaatattctaagactattagtaaataaggactgcttaagcaatatttgcctgcttctataattatattgtaattacattttatcatagacagtgaaatatgtagcaccttttgcaggtggaattctcactgctggtttgccttaaaatattggcatttggggatattctctctgctaattaatattgtttgttctcttacatctctgttcataatgagacagctctctgttagacatagagaagttatctcacttgagaaccttatgatatctatttacaagtgcatttttgtggaaatataattttaaagaatgtccgagaggttttaaagcttttattagcaccttaaaatatatgtagcattttttcattttattgcaaagctacatgttaatactctaatgctaatgaaatatttcagattattttatgcattagaaaacaatttctttgacatcagcttccattccatttatttaaatagtattttttaaaaaaaatatttggtctttgttttattaaaaacataattcaggccaggcacagtggctcacgcctgtaatcccagtactttaggaggccaaggcaggcggatcatgaggtcaggagttcaagaccagcctgaccaacatggtgaaaccccgtctctactaaaaatacaaaaattagctgggtggggcacatgcctgtaatcccagctactcaggagactgaggcaggagaatcacttgaacctgggaggtggaggttgcagtgagccaagatcgtgccactgcactccagcctgggcgacagagcaagactccatttccaaaaaaaaaaaaaaaagaaaaagaaaaagaaaaaaacataattcagcaaaagaagcaatacacaagaggtaaacaatgacttgcctaccctggtcccacaggggcagtggcaggactgatatgaagacgcttacctcctctgccatccctacaataatctatgtttttttgtcataaataaaaagagtatcacttactagggagcagatgagatcacagcctcaagcaatcctgcggagcaccacctggcagaggctggcttcctgtatttgctcaagcaagctctgtgagttgtgcttccttattgtcatggatctcttttcatggtgcatccccattcctacatttaatcacacacatctcagtcagagctctagggctttattacgaatggagttgactgctagagaggcccctccaaacttttttctgtaccgtcttccctcccaagacatctctccggggaggacattagggaaaaggaaatctggagagagtgaaaggtgcagtgctttctccaaagttctccgaagcaaccactgagtctttgaaaatcttctgatggaagaggtaagaactttagctctcatcttcaagttccttcatgtctacatcctggggggcttttgtcttattttgccctttgagctgtggttcactagtcgtggctggctttgagggggatttcacttccatcgctgccttctctttctgggcaagtcagatccactagaggggttttctgtgcttcttccccgatagagtaatgttggtaggtgcactggatacccacttcttgaggtgatgtggcaaaatcaacccttggtctgtcacagtcctgaccacccagtgcctcagttgcagttcccagttcaacacctgcaggtgcctgaacagctgcttcttcgattccagctggagaaaaagatgcaaatcaaatggaggcagttcattgcaacctggaactgctgcaccaggcaaccccagttcctcattgatctcatctcaggcaagacaagagggctcctagatgcttgaggaaacaaagttgtggtccccactcagccaccattctgggctggttgatctttcttccaggagcctgaactagtattgatgtggataagaggaagggaaatactgggtagaagtgggcagttccccagcaaaggccccacccctaagcctggaaaccgaggccctgaatgagaacagttatccctgttttccctcccaaatgttacatttttggtctgccctgcctccctccccacttatcctgtacccatattaaccccaaacctcagctggtagagacgcaaagcagctgaacatcaagaggagtcgcagcactgattgtcggagactacagatagatgtggcttaagttgagacaacatggcttcagggaaggatcaccttcttcctgcaccatcccctttccagctccccttttgctgagagccacttccactgcttaataaaatcctctgcattcatcacctttcagaccttcatgtgacctgatccttcctagatgctgaacacgaacccaggtaccaagagggcagagtgtaaaaggctgtcttcctgactctccactgagctggttaacagctgtctgcagatggcagctgctaaaagagcattaattgtaacatacccttagacagtgctgtggggccagagcccaaaagcacttctgcacctgcttgcctgtgtgctccctctcccacaaggggtttgagctcagtggtggccaggtaagcgagccatacccctgttgcaagtcccacaaaggggtcaagggaactctcccatcttgttatcttgttgtatatgaacatgacaagaaacatcattatatctttgcttttggcgttcatgcttacctatatgtagaccacaattgtaatcattcaatttgaataaataagtaataatgtagatatacaagtttatatctgtatatataataatggttatataacaactaatacttcttcaatgcttattgtttgtttatgaaatgctatttgttttacatacattggaaacatttaatccttaaaataattctatgtggttaggtatattatcactattttgcagatgataaatctgaatccttggtttcaggatggttgtttacttacccaaagtcatacagccagccagtagcattttgtcacacttcatagttggagttcttatctacattataagttaatgattaggtaattcctagaagtcagcctaagttgccagttatattaactgctacttaaactatacatttttaaatctcagttctgtaataatagtaggtttgcaatagacttagaatgtatatgcaaaccatagttcaggaatgtggccacagtatgcctgtgtattagcacattcacttgtcatcaaaatttttgttgggcatctactatatgctggatacaggcatgatgcaaacatttaaaaatatggccactgtcacaggaggcttaaaatcttgttatgaacccagttaatgaagtgtttgcactattatgcatttggatttttagttgactcattaaaataaactaaataaattaataaataaattacattcaggtatttcttgccatctgattttcttttgtttcctaagcttatatactgagagatactgcattaaccgcatatttttggcttctgaaatttgaagagccagtagcagtgaaagcttgaagagccagagaaaacagcctcatctcagagagtttattcttgagtttgggtagtgtgagttcagttagggagagtttggattgtgagggatgtgtatatcatgtcttaaaatagtatatcaataataaatagaacgaaagggtgatttaagacgttattacccctccaccattgttctattatgtacccattgaatataaagatattcctcaggaatatctattcctctccaaaaataattgtcacagtaatttaataactgaattttgtatacatcttaatgttctgtttgtgctggcttacatatatgtaagtaaaatggtttatcatgttttaatacccaagtattgggtattagaagaattgaaagattatctacataacaagagtgtatagtcttgaaaaagtggagtctgttatgcattatgcttagacagatggcagaatggaaagccctcttttaaaatcagcttttatagtatggcctagcgaataatatataacattatgctagcacactcaaccaatttgtttactcattcactcaacaaattgagtgcctgatatgcatgagactgtgtaaactgtatctgcttggtgcctggcccctggagattaaaatccagttgagttttctactattcaagagatagtatttgtagtctggaaacaagtagcttgggtttgcattctggctcttctacttactagctgcttagccttgggtgaactgttgaacctctttatttctcagtttcctcttatagtttaaaaaaaaacaaaacaggaagaagaagagggagggggatgatattaagagcatctaccttatggagttttatgatgttaataaacaaatgtatggagagttttagaacagaatattgcatggtctaattagagcagaatattacctagttaattaaataaacaaatatatgaagaagttttagagcagaatattgcctagtaaaatgttagctctttttattattttaatgtggagacagatgcttagaaaaactgcacgttaagaggttctgggcttagtccagaagggtcaagaatgactttccttgagatatgatatgggtctgagaagtgaaagatgaataatattgacagattgagaagagagaggagtagagtaagaaaatcccaggctgagaacagcaagtctgaaggccaggaaggggcaagtcagagtggctgaggacaagtataggccacaagtgctaagtgaggatgcggcagaagtggcgatggaggccaaatcttacagagccttgggaagcctgtgaaggaagattatcataaaagcaagaaagtgacacaatcagattctcatcttacagagatccctctacatgcgttctgcaaaatgtatgtggggagcacaaccagatggctgttgaaggtaaaagatgatagcttggactaaggtgggaaacagatagaagtggataaatcaaattatatttaggggataaaatagacatgacttaatgatttattggataagaagtatgagggagaggaactgtctgtgaagactcccaaaagtatcagatagatgacaaatagattacagataagtcaggaaagtgagggaatgtcctaagaagatgctcaggatatatgagagtttgctgataagaagtttagagcagtgattctcaagatgtggtcgctggaccagcagcatcagtatcacctgggtgcttgttagacttgtaaattatcaggtcctgccctggatttatagagtcagaaaccctgggtgtgatgtctccctaatctgtgttttaacaagtttgcatgtgatttgaatgcacagtaaagtttgagaaccactgttttagaggcacggtggaaaagttgaggaagagggacaaatgaatgttagagtcaagccaaggacttaattttatgaaacaataatgctttcacataggggtcagcaaactgtagccagtgggccacatctggccgactacctgtttttggacagtccacaagctaaaaatggcttttacagtttttttaatggttaaaaaaatcaaatgactattatatgacacatgaaaatgatatgaaattcacattttaatattcataaagttgtatcgggacacatttgcacttactcacttacatattgcctacatctgcttttgtactacaatgcaagagttgaatagttctgacaaaaagtacacaaggctgaaaattctatctagccctttatagaaaaatattgctaacacctgccttagagcattactgtatttgttgactgatgaaaacagaaaaaagcagcatggggagtttaatactctggtctgtaggcagaggatggactgtgtgcataatggacagatgtctaagcttgcttggtttggaaagatgcgtgcaaacagcatggtccttgttttctgccgtatgtgggcctgcagtcccagaacacgcaattttgcctaagatagtaatttacctggttctttttgtaacaagttttggagagagagtttttatgaaaatggatcaatatttattttatacagtgatgttttatcaacagtgttgaaagtacgttgtgtaaaaatattgtatatttttacgaaattgtgtaaatggtctgctgaggtcctcaagcatgttcaccatgagtatgactttacagtttgctgggtaacgttcagccttatcatgggaaaaaagtgaactttggaaattcttgcttttggtaatggtggatgagcttgttatagaccgtgcttcctgccaagaacaactagaaaaactgaggaagacaaaatctgtttgatggcagtgaggacttgaggtatcaggattctagagaaggaagtacagagggagagactcaactctgtccctaccgttaatcctcagtcattcgctaattctcagcagtagctaagaatctgagcagaactctggtactgttctggagccagaggttaaaaattggaatccagagattgctaagaaggagtggtccaggtaaacagccaggttttcatttcgatccccaaaaggtagaacagcactcagaaggtgttctacctttgaatagccagctttcagtccactcaattcttgattggaataaggtgatctgccagagtattgctttgattttgctattgttacaccagcctctaaatcagcaaagctattgagcccaataattaagtcctctgtgtggaccctaggaataataatcaaaccagtggggaggaaaagccctcctcttctgaaatagcagaacaggaagagaaagatcattttctacttcttgtgtcatggaggttaaaggtgggaagcccataagaagcctgagacttggtcagaaggaggagcggctctttgtatagatgaacgtgttgagaaccacctttatccctcacagcttccatcttaaaatgtatttagaactacctttatccctcacagctttcctcttaaaaagcagccaaacaacagaaaatccatccaggtctggattctagtaaagtcatttccggataccaactaggtcgctttgaggtggagtttcagcacctaaaaatcccctgctttgcagtgaagggtaagatgagagaaacaggcaattggagtcattctgttttttcctttttgttccagggtagttacatgtacttaatttgtttgaaacatgcaagtagattatggaacattaatataagctgtctataagttatccaacctatccgagaagcattcaacagtagtcactgtgtatttgggtgaattagaatataattgacttctctagtagacttttgagctgagttcatccttctggtttgttgactcctcacctggttctctatcgaattcatattttggaagtcatacctctttttttattgttagtttttaagggtgaatccagaatcttctttaatttctaatgctaacaagggcatagtcttaagttttctgtttactttattctgaactgcaaaactaggaaggagaatcggggtataagtgctctctgttctgtcagctcacatgcttcgtagcataagcaggtgtgtgatgattatttcagagcaaaaggaaagacttagtaaaatttgtatgtatgtattcaatttgattatagcttcactaaatatacaagtgaatataatgaaatggaatttcatgcaactcaattaaattagcttctttaccaccatattaattatccaaattttattaatttgaaatattttcttacattgttactttaacaacaaatgcgtcttcaaattaatcatctcttctgtgtattgaagaatagttcttttgattgttgtgctctttaagactttttaatgcattttctatatttagttatttcacaaattagtataatggctataattataataatttcttctagtatatggcagaacttaattttgcctatgaatttgtaaacatttccagaagatagaatatcttaagaatggatttaaaatttgggatttgggccaggatcaaagttcttgacctcatagtttcaagcatttattttttatatatatatatatgtatatatatacgtatatatatatatagcattttattttatctatataaaataaaaaattatatatgtatgtatatgtgtatagtatatatacgtgtacatacactgtatacgtcgtatacatacatgtatatacacatacatacatatacatatacagacacacacatatatatataatttccaaacaggctttactaaaccccctgaggtctcatgacacagtagaaaatcatgatttagtagaaagagcatggtcgtaggaatccagtagatcagtagacctgagttagagtcccaaatctgccactttcaatctgtatggcctcaggcaagttacttaacctttctgtctctctgtttctttataaaatggagataataatagtaacttcttcataggagtaaataacataatacagggataaataacataaaatacaacaacgtttgactcatagtgagcactcaataaatgttgttattcttcttaagaacaaaaaaaatatgatttttattacttcatccctgctgtagccaagcattatgcaggacaggggggatgtggtcacaaaccaatgtgggtggacaagtgggagctagaaaggtgaacaatagagtgtgatacctgctttaagtagagacttgtgcaatgtgctggctcttgtgagaagtggctaactcccattacatcatttcctcttcctgacacttttccagtgtatgattatgcccatttacagatccagagagggttataattgaaacatcagtcctcagacccctaatcttgtcatatatgatcgatcgtgctacagttctatagtgaatgaatgccaggtaaaataaacagctttttgagcacttactaagcatttaaagcattttctcactttttgtgggagaatacagaggaattggaagacctagttgtcatcaagaagcttacagatatgggatggctaaataaaaaagtcaattcagattgtatgacaagatagtgactacagataactactaataagtaattactggtaaacttttgaacaattttgaaaattgtgaacaataacacttagaaaaatggagatgaataaatgtactgcataatgagttattataaagtgaacatccattaactgccacccaggttgtaaaataggacattgccagcttcccccctccaagaaatctcccacattccctttcccaatcataaccacttcttttctcccataggtaaccactgtttgttataatcacttcctggattttctttatagttttaccatctcaatacatgggatcatataccgtctacattttggtgtctggcttctttgttggacattaagtttttaagatttatccatgttgtagggaactgtaatttgttcattttctttgaagtagtattccatttataactatagcacatttatctatttcactgttggtgaacattttaatataatggtttttttaagctccagactccaggagatgcctgtttcttttttcattctcagacattgttactttcgttcagttgaagatgtcacacatacctattcccttgtgtagagtgaaaactaatttctccctaattctttctagaatgataaatactatcatttttctcctcggtctgttatatagccacttcttacaatgttgatttctattgttcagttgaactcaaaagaaacttggggccaggcgcggtggctcacacctgtaatcccagcactttgggaggccaaggctggtggatcacctgaggtcaggagttcgagaccagcctggccaacatggtgaaaccctgtctctactaaaaatacaaaatttagccaggtttggtggtgggcgcctgcgatcccagctactcaggagggtgaggcaagagaatcacttgaacctgggaggcagaggtttcagtgagctgagatggcaccactgcactccattctggacagcagagcaagactccatctcaaaaaaaaaaacaaaaaaaaacttggaaagtgggattccttaacacctttggatttttccaaagtaatcactatgttttggaatgtctaatctcatcatcttggtctttttgctctgcccagctttgggaatggctggcttatcatgaagagcctaagaattctgattttaagggaaatatcatagtgataacttgtggtgggaaaagttagaagacagatgttttccatgaatacttgtggagaactgagtatacattataggtatgtatattaaaggaatgtgtgtcttaagtgaacatttcatcttaactccatgttgatgtcaaaatgatactttacttaggtagtttttactttgttaccagtagtgtaagtattctgaaactgttagaaattgtttctctgcctggaaatttcaagaaattcggaagacagggttttatagcagtgccttcacatgggggatgcatcttatttctttataatgatctgggtttaaaccttgaaatcaagtcccagaaacacaaactttatgaatcaaatacttattataaatattaatgtaattgtcagaaaactggtagaataagaactttttcttagataaaaataaaaactgtgtgtgttgaatttgaaattagtcgccctttatacgtggggatatgttccaagaccccagtggatgcctgaaacctcagatagtaccaaacttcattgctgtcggttgaaacacatttctcatgtcttccactcatgtatttaatgccttttccatcttaactaataggcatttatcacgtttctttttccttctttataatttcatagatagaacatcgtttcttaccatagtaacctcagcgtaggatttttcctttcctgttcaagttaagaacgtttatcttttcacttaaagaaagcagtttatgccttctctttggcatatttaaattgccagcatcatttgcactttggggctattattaaataaaataagagttacttgaacacaacactgagatatcctgataactgagatctggtaactgagatggctgcctaagtgactaaagggcagatagtgtacacaatgtagatgcactgggcaaggggatgatttacgtcctgtatgggctggagtagggtggtaggaggtttcatcatgctactcaaaatggtgtgcagttaggttggtacaaaagtaattgtggttttgccattttaatgacaaaaatcacaattacttttgcactaaattagtatatgaactgtttatttctggaatttttcatttaatatttttgggctacagttgacctcaggcaactaaaacctcagaaagggaaattgtggataagggaaggactactataaaatgaaatttaaacatttagcatgtaaccaatttaaatatttacaaaatcgtatggacaactcagttttcttttcctgctcaacaatactttacattataatgtactgtttatcatttgcatcatgaaacatttttattcacattaatatattgctagtgtggaaatggaagaagaaaacagttgatgtcagactcttcctcacttttgctgaagggattgcatctttatttggcatttgagttgagaattgtgctccttactactacgcaggaggccacttttaactgctcccttctcttgaacattacaatactttagagcatgaaaaaagcaaactatctctatgtgaactattactactccactgataaaatgctgaaagaaatattaccgtcatatacaagtctaaaaaaaattgctgcagataaagtcttatgaaactccattaatgtagtttcacagggattcttagcttatagcttacaaaataaaaaggattgtcaaaataccaagcttggaaaatcatgttcctgttatagaaaacataaacattcctacagactagaattcttaccaatttctttgtctaattaaccacattctgtcataacggaaaacggataaaaaggaatgaagctagccttttattttattttctgttttgagttggggtctttctatgttggtcaggctgctcttgaactcctgggctcaagtgatcctcttgcctcagcctcctgagtagctgggactacaggtgcatgccactgtgcccagctctgcccatttaatgtattgatgaggaaaaatagtagtggatgagtttgtgcattctgtgaataggagcatatggtcagcagttacttctcaaagttcatcctaagatctacaggtggacagagaggagaataaatgaaacacacacacacacacacacacacacacacacacatctcaggcctttcagtactataattaagtacaggaattcatttattatccacttaaatagaaagccacattccctatcaaattacagtagcctttaaagcttcaaattcactttttaataggccagacttccttccctcccttttttcatcctctcctcctttctccttccttccctccttctttccttcttctaccagtatttattgggtacttaaggctattctgggtactagggatacagctgtgaacaagttagttttcaatgagtttatgtttgagtttgaagagacaggctgtaatcaaacaaataaataagaaaataatcagatgtgaagatgtgctctgtagataattaaaatggaattctgctaaagaatgactggtatgttcctttagaatggttgactagggaaggcctttctcagatggttatatttaagctatgggcttgagtgtcttagaaggaatcatcatgttactgtctctgggaagaacattctaggctaaggaaccagctagtgcagaaggcaggaacccactttgcccaccaggtaacaggagaaagatcaagaagctagtagagtatggtgaaaaggtaagtctagagaaatgagcaggagttagaatacaaaacactttggaggctaagaattatggatgaaaagaaaacaagaataatgtagcagctactggttattgactcactttatgccaaatactataagcacattaccttacaatctttaattctcacatttgcttaggttagtgttgtcacccccacgattcaggtgagaaaaccaaaactcagaatccgtttgctcaagatcaccttgtatgtgaaaaggtaaaaacgtgggattttatttgcgctcttgtctgatggccttcaaaacctgtgctcccaacttactatgctgtaaagaagctatatcgttctaactttctcctcctgtcccattcttcccttaattaatatcttcttcaattatattggtcctgggacatagccagagaacttcattatatatacatatgtataaatatatatttttaggtggagtcttgctctgtcgcctaggctgtagtccagtggccctattttggctcactgcaacctctgcctcctgggttcaagcagttctcctatctcagcctcccgagtagcttgggactacaggcatgcaccaccatgcctggctactttttttttttttttttttttttttgtgagatggagtctcgctgtgtcacccaggctggagtgcagtggggcatctcagctctctgcaacctctacctcctgggttcaagcaattctcctgtctcagcctcccgaatagctgggattacaggcgtgcactaccacgcccggctaatttgtgtatttttagtagaaatgaggtttcaccatgttggccaggctggtatagaactcctgacaggtgatccacctgcctcagcctcccaaagtgctgggattacaggcgtgagccaccgcgcccgaccccaatcttatatttggttttatttctcccatttgtctctctaaatcccttagttgataagttaattacactatctttgtttgaaaagaatataaacttagaacaagactagaacattatgaaacaacttccacgtaatgtcacaccaggacaagttattatcaagtgatcttacgtgatagtcactagtacttcaggagataagtttgccggaggaagtatatcaacaatttactaaaaaaccattttggccagaatggtttcaaagtttttagttccattaaaaactagtggacatttcccaaaaactagtactagatgagtgtcagggttgattaaagtttagaaattgttttaagaactttaattcagctgatatttagttgctagcccacatgtcctgaagattttcaaccatctttggtttggaaattatttgcaaataacatatgatcaccttttattaggtatttagaaaaaataacttcatctgacatttgtctctaggtatatggttgtgatgtcatcagggttacaatacaataaatactctagttatatgttttaaataggaatatatagcagtagtacaaagtctcatttttatttcagtaacttttcagaatgttgccatctgatctagctcaagacccttagtttgtgacactcacttgaatacttaggaaaagtctatggctttgatctgatgcctgtttgggcatcaaaccagagatgtggttgagtcccaaccagagtttaaccacagctcaaccacccttgacatcctttgacataccttaagctttatgggccaaaggctgcttgaggaggggagtacatggcagcctcaggggcagattgagtgctgcttttagaaactgagggacaggctgatctgcctagaatatattggatcttgctatgtaaatggtttgtatacattcagaatcaaattaacaaaagataaaaaagactagtgaaattgaaattatttgacttcttgaacaaatataattatttttgcacagttaccactagtactttgcaatacttgatctaagcattcaaacaccacccctgtgggcagaattttatggacactgcagtgactgtcaaaaacatgaaaatttcacatcttcccaacattttcagtttcacttctccattaatagtcactaccttatttttaaaatcaaaccttgtgttgtgtttagctgtttgtaaattgcctacgtcaaacgatacaacactctattggaaagttctttgttggttctgaatatacatacttggcttttcatggaataatgctgcagccacataacagaactctgtcatcagtgttttaaatcctgagtgattatatgcattaaatgtcattgtaggggctgggcacagtggctcatgcctgtaatcccagcacttagggaggccaaggcgagtggatcacccaaggtcaggagttcaagaccagcctggtcaacatggtgaaacccggtctctattttcaaaaatgcaaaaattagctggatgtggtggtgcacgcctgtagttccagctactcaggaggctgaggcttgagaattgcttgaacccgggaggtggaggttgcagtgagccgagattgcctgggcgacaaagtgagattccgtctccaaaaaaaaaaaaaaaaaagccattgtaggatagtagtaattttaaaaacatagaggacaaacaaaaagtactttctacttcaatccaagatgaagaattaaccatgtcagtaacgaaaaggtggaccattgcagcatctgtcattattgtttctcattttgccttcttcttcctgtcttctccccattgccatctcattttctctgcagccatgagcaggaactgtatgcaaagtacaaaagactgtattcctgaaacagaacttgttgaccccattttcttgactcttatttgacattgctttctaagagaagggttttggattacacactcacacacacacacatatgtacacattcatagtaataaatgtatttatcaactcagttgcaatgagattctgcttgttggaatatcatataataaatagctatattggtatttattgaacattggctttttatatgactgcaataagatttgatgctagtatttttaactgttgctccctctctgcctccatgcttagctgtttaacatgacattcattcatcaaaaataaatgtccaagtcaatggagtgtttctgtaacagatattagtcaccttaaacttgttactcatagcccataaactcttatcattctttctcagataacccagttgaccctacattagtagaaattgagagctctgagttcatttttgttgttatttgatgaatatatcacttggctgactattaggaatgtagcatttggaattgtataagtaacaggttaagactgtgtactgatttcctttttaaaaattctgttttatgagtttgtttatagcaacacaaagtaccttctttttgcatagctttttgttcatcagcattttttgcaattttaaaaagcatgatttttatgcttcatatttaaaataatcgctaactgtagcgtttaaatatttgccaatgtatgtctgtctgtacttaatactcctatggcaacaggcagagagaatttgcctagaaatttccatcacttttctgcactgtcaaattatattatgcagttacaagtatattgaatacagggaaatctgagatacaagtagttaacacattctatttcccactactctgttcagttcagccacttcgttagcattctgaaatttggcttatatactttgactcagatgcgaaggtgtttttctgatactgaaatgtgtggaacaaagctggaatttaattgacagttgctgctgctgtaatcagtgaatttttgaaaaatacagcaacagtttgctgtacaatatttttgggtttgctttcattttaagatttttacacatgggaagtcatgcgaaacagtataatgtggtagaccattgtaggtttgaattccaaatatgtctcttagctttttacacttggtcaaagcatttatgcctctgagcctttgtatcattttttaaaaaatgccagtgatacacctgcctcactgattgtaagaatgaaatgaggttatgtaaaacaactaacacagtgcctaatgctttcatttagtcttgaagtcccagagcttgttagtggcagagcctgaaaagccagctcttctgacacacagaagtactttctcaaccatggcacactgtctattatttttggttagtagggagtatgagtactggcagatggttatgcagagctatgacttttttcaggtaatttttccccataaaattttattagggattttcctcaagaattctaaaaagtcactcaaagtcaggtgaaaagtgaggggaggagtatagaggtgtccaggcttttgactgggtgattgaagataatggggccatccactgaaatctgaagcacaggaggaagagaagcagttctagtgagatggcaagttcatttaccacactctttaacattttgtttagttttaacctttatttatggataataaaggttaatattaataatgatttattttaaggcattcccaaatttgcataattctccttttggagatacccttttatctccagtgcaagtctggatcaaagtgatagaaattccatgcagtgctatctctgatgccatgaattggtcactaagaagaattgacttttccattgagtttcccataactagggccaagttaaaatctcagccttttctaatgacatttttctccatgaagatcttctcagttgtgaagaatatgtgtttgttaaaaagtaaatgaaaaattaaaacaatagcctgagtataaaactgggttacttaaaagtacttgtagttttacattgactgcctggaacgcagaattataaagtaaaagacagtgttagacaatatttccaaggctctccagtttgtaaagatttgttaatggatctcccagttcccttcctgtttctttctcttgctgccttccttttctgattctctttttctctttcttttttatttccacaaataatgcagcatactggaaagggcaggtcaggacagcctaggttcagaatctggctttcacatactacttgtatgacctcgaactgatatgtttaactctttgaccaaacctccatttgccagtctgtaaaatcgcaagactaatacctaccctaatgaggttattgggaaaaatgagaaaacagatttaaagaactcatctagttagtaagtagtagtttttaatattgttgttatgtatccgcttgaaactgtagagagaaataagacatagtaaaacttaaataagtaaatgtagtgatttatgggttcctaggtggaaagattttggttaaagagaagattgaaactaatagttaaaatgggttttctaaaagattatctttgaggttatccctcttaaccttgtgttctgtgaccatgacaattgactgtaaggaagatggaatgaggaaacaattctcctgccaacataaagaaaatctgtatgcccagaggcatgcatatccagccgtgttggagaaagtgctttaaaattcagccagcaacacttgatacctccctattgatgaattgcttgctaaactgtgccacagagtattcaacttaattcacttagctctcttggcacagcttctttatgaagtcagtgtcccccatgaggagggcaggggctggggtgtggaagggtccacaggaaagcccattccaaattgtaaagcaatcatatttggtgatacttttaattcattggattattcccttccccagttccccaagtattttggagacaaatttttcttcagcttcacatgttgaagatattctccaaagatgtcatcaagaaggtatagtctccctttttctcttgagaaccctgactttcagaatggcctggaaaaaaaaaaggtcttgaccactgtgcaggtgagcatcaagctttacacatttttttccccattttttttctggaaagaataaaaagattcagatgacatctgagacaacctggtataaacagccctagtctagctgctacacagctgcttagttctggttctgtgaccttagctaagatcccagtgtccacaaatgtaaatgatatattgacatcttgacatcttgattaattggagggttttttctgaaatattttaaacttttaattctgaaaatgttcaaacatacacaaatgtaaagaattgatcccctgctcccgtactcatccctcttctttcactaccgtcaacatttgctacatcctttatctcctctgcgcccctccctctactttttatggtttgtatgtttgttttgggaggagtgcatgtgtgtgtgtttgtgtgtgcatgcgtgcatgtgtgtgtgtgtgtgtgtgtgtgtgtgtgtgtgtgtgtgtgtagtatttcagagaaaatcccaggctttatgccgttttactcctaaacctctgtacatctcaaataaaacctaaaactttgaggtctgttacctctgcctctgcttacccttctgggaaatagttaccaataatataggaaatataaaaaattctgtttcccaaagatttctgattctgtaatagtcctgtttcagtaattcttaatttgaagtttatagaaattagtgggtattggaaccttctgaaatgaaatacagatacttacctttatgtgtaattgtgcttctggtgggggcgggggagatgggcttttattaaaaaatacaatgtcactgaagtaaataaaacttttaatgaagaatttattaaaaaatacactagcacatcatgatagtgtttttgtagaagaaaagtaagctgtgtctaattctgtatttagtaagccaaagccatttagatattaaatacatgctttacacaggttttttagaaaagaataagttcacttatttagagttaggtatatttatggcctcaagataaagttgttagtctcttacagtgtctgtaaagaaataagacttttctccttttttttgtgctaatgaaatgtttccaaaggacattcattttagtattgacttgggtttgataatttatttgtttaaaatttgatataatttatctagaaaatctttaaatctggatcacactgggcatctaaacctttaaattaaaatacatcctgcaactttggtcctgcagcagtttttctcagtagagaatgaggaattagcttaaagctggtaagtgtgccaaccctaggttaaagctttacatctgttaaagtatatgactctgatgactggctcctggaggtcataaatcttcttgctaagatatataggacctgaatttgaagtgaacttttggcaatttaacaccagagttggaaattagactagtgaagatggtaaaagctgctgctccctggagcagctctgagctggccctcataggctatccataagtgtcacgattcacaaaaaactagcagagtttttccagtactgtagtttaatttttgtttcttttgggagtatacttgttacttggagtattggtttatcatttgtcagtttttgttcttttgccttaccttgatttagtatcaaacatgagcaaatgcacagggttgtattagcctttgagttttatgtgactcaaagaagagcccttgtatttgaataatgcttaattcctacttctgtgggatgttattaaatatgagtacccacagtatccaaagcagattattaatgattattacaccatgacaagggtggttctcatcatacttcataattaaagaggatgattctgatggcattgttgggctacattcctgaccattggctttactttctcaggaataatagaatgtggattgtgttgccattcctttctgccatgtgccttgggatgaatgtagatagacaactgtgaaaagatcagtttttaaaaattcaacacaacatcactaaagcagaaaaagcagagtgttacacagttagctcttagaaaacaggtatttgggtcacagaaagaaaacgttccatggctgtgatgtaatgccaaaccaaagtcagcgtattttcaggtacacacaaaataatcaagtattaatatgatgtacaaagaacataggaaccctttgggtagaaacttctagatgtaacctcatgactactgcctgattatcatgctcttactgagtaggagaagacaatgtgtggtttctccttccagtgaaatgtataccccatatatttcccctgtaattataaaaggcaactgagaaaatggatgttgtaattacttctgtattttgcattctttgtactattactgatgtgtgttcttccttaagaatctgtattaatttcccaggcctgctgtaacaaattacacaaaataggtggcttaaaacaaaagaaatttattctcttgcagttccagaggctagaagtctgaaatcaaggtatcaacagggccatcaatgggtccctcagaaagctctgtggaaaaatcctttcttgcctcttcctgtcttctggtggctgctagaagtccttagagttttttagcttgtattggtgttactccaatctctgtctctgtcatcacacagcctttttccctgtgctgtgtgtctctgattccaaatactgtcatcttttctcttatacagtcaccagttactggatgtagagcccactgtgatttactgtgacctcatcttaattataccttaattacctgttttcaaataagatcacatttgtgagttctgggggttaagacttgaacatatctttttgagggacacagttcaacccagtatagaggccatggtcatgggtaagcaggaggataagttttcagtgtagatttggagttatggttttggtataatactattaacctgttaatcacagaatttaaaagtgtctgtcaattatctgaaaatataatgggaactcttgttaagtgagggatgattccactttgtgtagaatattttatttgcttagtttctcttcctctgcagcatttaaacaacagttttaacctttaggctatcttttcttgattttcctcttttaaatttttcattgctcgcatacttgagatagatttcaagccttagagcacatactctcatgtgttgagagtaaagatagagtgagagagaacttagctgtaaaccctatttagcatacatataaagtaacgaggcatgtttttatgaatgttctaataagccttgcagtttattatgaggattagggttgaataatgttattataaagtgtgtatgtagtaccttcatcttttctactaattttattcccgaaataaccctgtgaaattagaatatgtattatctgcccttaaaagatggaaaaacaagtgtatgtagaagtagtatgaatcctgtccagtgtacaaagtggagatatatgtaaataaggtaaaagcagaaaacatcaaatgtcccctactctcaagacatttataactgaatgcagggtgcagacaagttaacaagcaattctgtctgatgtaatataacagcagaagtgtctgtaaggtgttttgatagcaaatgggcatgggagaagatgacagaaaaagaagcaaaacgcttgaaaaacacttaaagaagcgacagactttctccttactttttccctttttttctcatcccctcctctccctcctcaaactagggtatagtttgtaaattttttaaagttcattgaacaaattaaaaaaagagaatgataactgcagaatactataatgtgctctggaagatcaggtgcaaatatttcacatcacagaacaaaaacattaggaaagggcaagacaatgtctgttccaggcctaaggaaaagcaggattcaggcagcatgctcttccgcctcagttgaggctgtgggttgagccctctctgctcctgaactgttgataaaagtcagggtcagcaaagtcagaagcagtttggctgatgattgggagtcacttgcggttgggaagattggaccctgtaggggtctagagacctgtgctctagatgatgcctccacatctgctggtctttgtttcaggcttctagactttggggagaaaagcaagccttctcctttactctgatggtcctttgcctcttgcctgatgacaagtaaaatgaaactccactcctcttctttctcttagagatctcaggataattcgagacctcacctgtctatcttgggttattgaggacctcctgagaggagcgaggaggttttgggggttgaggtcaaatttatatgtgctaaattaaacattttaaatttctcaatattacaactttaaaatactccaataatttcttcgtctataattgtatgtcaaaagcatgataaaaatgccctagttgtctactggatagcaatatcatcttaggcaagctacctaaattctcattggctcatttccttcaactagaacgttgagattgagagtctgtgaaaattaagtacttagtgtagtacatactaccttctaagggttcagtgattgttagctattgttataattattatgtgtgatgatttggtcagtttatgaagatctttgacacatatttattaaccatgagttattaaaattaatagttctaattgcagtacaaacgaaatcacagttgcttgtctacaatgtatataagtgtagagagaagtagagttaattgcatactgactggtcataaaattagctgctctgataattaagattcttgtgcaagcaacacttagatgacagtgtggaccccatatctagccaactgagtacaaggaaaagtagaaagctccccccaagatggtgcagaattagttaccagttataatcccatatttaaataggatgtaataattaatgtatgtaaatgtagaccatagtcgatgaaatgcattgtaattatttgtaattttcattttcactgtcttaaaacgtatttgtgtttttaaagaaaagatagttgtccttgttaaaaattattttgccttatgaaggaccttgtttgtatactagatcattttggaaaggtaaagttaaatttcgtagtagtgacagcagcaagactaaattggtttcagagcactttcaaaggtgcagcgctctttgcagttgatgtttcctgctaagcatttttgaagagctaaaactattgagccactctttgtgaagttagaggtaggctgctagtagaattcctactggttagtagaacagtaaattcaaacaggttggaatgccagttcttcaagatgtttggaaaatgcagttcaactcagaaacaggacttaaattaaatttggacacctgattattattaccttagttaagagttcagaaacaactcttctttcctcatgcctttattcaagtacactgacaacatactttagtgcagtggttctcaaggtatggtttaaggaccccagcatcaccattgcctgggaacttgttaggaatgtaaatcctcaggcctcaccccacatttacagaattaacaactttgagtggggagccagaaccttgtgtttaacaagccttcctggtgaatctgatgcagctaaagcattatcattcctttttataattgttggcccttacccaatttaaggcaaatttcaagaaaaaactgacaacctaaagaagtattgtgtcatagatggggaaccaagatgcttattgaaagacacaggaaggggaacatcacactccggggacagttttggggtggggggaggggggaggaatagcattaggagatatacctaatgctaaatgaggagttaatgggtgcagcacaccaacatggcacatgtatacatatgtaacaagcctgcacattgtgcacatgtaccctaaaacttaaagtataataataataaaattaaaaaaaaatctgagaaaaaaaagttaatttaaactttagcacatcgtatggttaacactaggtaaaatttcccttttgaagtcactaatatgaaatacataccacatttgttttctgcagcagtagagctaatatactttgacctttttttcccaaatgatactttataagtcttcaggggagagattgaaagtattaaatttcaagttacaaccatcatcattaagatcagctcagccttaatcttttggccttgtccctgcctttccctgcagtgccccagccagtctgtactttatttccttcagcttctaatgttttttcttcacttttggtgtaaaagattctcctctctctgcctggaaccactccttggccccactcttccccttggcaagctcattctttaggttttagcttagacatcactttcttgaagtaaatttcccttaccttctctgtgttcccacagacccttatgcttcctctttcctaacgtcatccactagagagtaattgcctgtattttgttctctaggccctaatacacggtaagctctataaggtcagggatgctcccaggctaccagcactgcacctggtacatgtcaggcatccagtgcatacctgatgagttgaacaaatgaggaatcattccactacgtaactagcaactaagcattcaagagatcagtatgaatgcatatatttatcgttattactatatatctgtatatcttggtttttacatttgttccttcttttgtatgtttggagaataaaatcctttataactcactgcatcccttccttaggaactcttaatacatctgcctcatcccatttatctgtgtcttgaaagggaataaacaggacccaaatggtagattatcccaatgtacaacaattcagcatgagaaattccatgttaatgacattgttacagtataaaagaaccttttaaatctgagacttggttttataaatcctgtaattaaccttacagagaaccatattggtccattttttccagttgtcaagagagaccccactggctggagacattcaatctaccttactctgtttccagtgagtgaaaatatcttcatctgtctatgtgagctggtgcacacttgttaaaggtcctgacatagtgcttggtatactgtaagtggtaaataaataagaattgcttcccttccctcatttgagctttcagaaacagggatggtggtaaaccgttcatgaaggatccacctccacaatcgagtcaccacctaccaggccccacctccaacaatggggattacagttgaacatgagatttgggtggggacacagattcaaactatatcacattgcaatggtaggatcaggtaactttctagtgtgatcagtcatcaggatcttctgctaatttggaggaggatgctatgatatgtgtctcctcaaaattcttatgttgaaatctcatccccagcgcaataatattaagaggtgaggcctttacaaagtgattaggtcatgaaagtggagctgtgataagtgggattagtgcccttataaaagaggctgaggaagcttgtttgtctcttccaccatatgagaacacgtaaggtgccatctgtgaggaacaggcctcaccacatacagaatctgctcatgtcttgatcttggactacctaaccttcagaactgtgaaaaataaatttctgttgtttataaagtacccagtctaaggtgtagcagccgaaatggagttagagtgtttggtgtgagaacaagacatgaagactttcatgattttgtgtgcaactcaagaggtgtgaagctactggacttgctagatagttctccttccatacaaggttggggaacttgtaagatatttctgggtgtcacacattttgaatgtcctttacttccactgataaaatttatttctaactttttttatgcgtatagatgaacttttccttggtaatgcaggtaaagatattagatgcaggtaaaaacactggattcctctggagttaaaaatcctgattaaagtccttcacatactaactagccattcctggagtgataaatcctaactaggtccttccagtgataccttgcacacagagatacatcctatgtctgtatcagtatttttcttcaaattgcaactctgatccatcagtgggttgtaaaatcaaattagcgagaccaacatcctttgctaccatagtataggatgggaagggtatggaatgaggctggagtacattacatgtaaaaaattgttttttgaacctttccttcctgttatacatgtacacatcattgtgtagtgctgtaaaatgcatttcttactgtgggtcgtggagaaaaatgtttgaaatcagcagttagtttttaaagtagattacaggtgatgtacatctaaaaatttagccaattctaggattataatggtttggaatttgctgactttttgtaggtcatatcagtaaataaaacccttttccatatttctgaaattatattcttcttttttattattattatactttaagttccaggatacatgtgcagaacgtgcaggtttgttacataggtgtacacgtgccatggtggtttgctgcacccatcaacccatcatctacattaggtatttctcctaatgctatccctcccctagcctcccagcccccgagaggccccagtgtgtgatgttcccctccctgtgtccatgtgttctcattgttcaactcccacttatgagtgacaacatgtggtgtttggttttctgtccccatgttactttgatgagaatgatggtttccggcttcatccatgtccctacaaaggacgtgaactcatccttttttatggctgcatagtattccatggtgtatatgtgccacattttctttatccagtctaacattgattggcatttgggttagttccaagtctttgctattgtgaacagtgctgcagtaaacatacgtgtgcatgtgtcttatagtagaatgattcataatcctggtggtgacaaaatctctcagcatttgcttgtctgtaaaggattttatttctcctttgcttatgaatgttagtttggctggatgtgaaattctgggttgaaaattcctttttttaagaatgttggatactggcgctcacgctcctctggcttgtagggtttctgccaagagatctgctgttagtctgatgggcttccctttgtgggtaacctgacgtttctctctggctgcccttaacatttttttcttcatttcaaccttggtgaatctgacgattatgtatcttggggttgctcttcttgaggagtatctttgtggtgttctctgtatttcttgaatttgaatgttggcctgtcttgctagtttggggaagttctcctggataatatcctgcagtgttttccaacttggttccattctccccgtcactttcaggtacaccaaccaaacgttggtttggtcttttcacatagtcccatatttcttggaggctttgttccttcctttttattcttttttctctaatcttgtcttcacgctttatttcattgagttgatcagcagtctctgatatcttttcttctgcttgatcaattcggctattgatacttgtgtatgctccacgaagttcttgtgctgtgtttttcagctccatcaggtcatttatgttcttctctaaactggttattctagttagcaattcctctaaccttttttcaaggttcttagcttccttgcattgggttagaacatgctcctttagctcggaggaatttgttttacccaccttctgaagcctacttctgtcagttcatctaactcattctccgtccagttttgttcccttgctggcgaggagttgtgatcttttagaggagaagaggctttctggtttttggaattctcagcctttttgtgctggtttttcctcatcttcgtggatttacctacctttgttctttgatgttggtgaccttcagatggggtttctgtgtggacgtccttttcgttgatgttgatgctattcctttctgtttgttcattttccttctaacaggcccctctgctgcaggtctgctggagtttgctggaggtccactccagaccctgtttgcctgggtatcatcagcggaggctgcagaacagcaaagattgctgcctgttccttcctctggaagcttcatcccagaggggcacctgccagatgccagccagagctcttctgtatgaggtgtctgtcaaccactgctaggaggtgtctcccagtcaggaggcatgggggttgggtcagggacccacttgaggaggcggtctgtcccttagcagagctcgagggctgtgctgggagatccactgctctctgcagagccggcaggcaggaacatttaagtctgctgaagctgcacccacagcctccccttcctcctagtgctctgtcccagggagatgggggttttatctataaacccctgactagggctgctgcctttctttcagagatgccctgccccagaaaggaggaatcttgagagacagtgtggctacagcggcgctttgcaagctgtggtgggccctacccagtttgaacttctggcgattttgtttacactgtgaggggaaaaaccacctactaaagcctcaataatggcgggtgtccctcccgtgcccaaggtccagcatcccaggtcgacttcagactgctgtgctggcagtgagaatttcaagccagtggatcttagcttgctgggctccgtgggggtgggatccgctgagctaaaccacttggctcccttgcttcagccccttttccaggggagtgaacggttctgtcttgctggcgttgcaggcaccactggggtatgaaaaaaaatcctgcagctagcttggtgtctgcacaaatggccgtccagttttgtacttgaaacccacggccctggtggcgtaggcacccgagggaatctcctggtctgcaggttgcagagaccgtgggaaaagcgtagtatcagggccagagtgcaccgttcctcatggcacagttcctcacggcttaccttggctaggggagcgagttcctggactccatgtgcttcctgggtaacgcaatgccccaccctccatgggctggatccgctgtgtaaccagtcccagtaagatgagtagggtaccttagttggaaatgcagaaatcacccaccttccgtgttgatcttgctgggacctgcaccccagagctgttctatttggccatcttcaagccaggctctaatttttgtatttttagtaaagacggggttttaccatgttggccaggctgttctcgaactcctcacctccggttacattattcttgtatagagttgtcagccaagatagtaaccagagatgttttgtttgttgaaaagtacatcttaagctgggcattccatcaataatagactattttctggagatgttaaaaatcactgttatgatagatctgtcatgataatatttagacgctgtgactcttcagaacaacagtgaagaaagaagatgtgatgtgatgattacagcagtaatgactctgagcatcagatttagtggtatttaagttatgctgttactttgcaagtgatacttaaatatggttaaaatacccttggcagtaaggatgttagattaaatgacttcccacctgttccagtctttctgatttttctttcacaaatgttactttttttttttttttgagtcagggtcttgctctgttggccaggcttgactgctgtggcatgatcatgactccctgcagcctcaatctcctgggcccaagggaacctcctgcttcagcttcctgagtagctaagactataggtgtgtactaccacatctagctaatttttttatttttatgttttattttgtagatgtgaggttttgctgtgttgtccaggctggtcttaagcttcctcctggcctcaagcagttatcctgccttgacatcccaaaatgctgagattacaggtgtgagccaccatatctagcccacaaacattagttttctaattaacttgtaataaccccctaagctttgctgtctctggctatgctgatggttctaatatgggaagcagttaccacccccacaccctcaatgtgtactctttggtattgttctacctatacagtgatgagttgtcaacatgtagtacactttctttaccagatctccctaagatacaacacaacagtgcctagcctggaagccacaaaggacttcaaataacacagagaagtgacccaccagaattacctgggaagcttttaataagttgtggatgttgcttgagaatctgtgcttttgttatgcagtgttcttgcagagattatttccacttgcctgccgtgcatagttttgaaaaaagccaaactagattgtgagctccctgagagcagggacatactcctttccctcaaaattatggcctttgtgtctcgtataccttctgacagatattaggcactgaataaatttttgttaaatgaatgaatgagtctttggtttcaatgacatttgcttctcttgaggaacctggttagttgacataaattgcatgataccacatagaatggggaagctctccctttcctctctcttgctcaggtctgcagaagtccaagggtcttctgcctctcccttcaattaaatttcaaaaccagcagttactactgttgggtgtgggacaaaatgcctactactggtgggctgctaagactaggcatgtacatacaagaataaacacaatatatatttaggcgtttgaatggatacagatgcctaagagagagagtctatcatgaaaaatttgaacaagtagccctcatctactataaaacctacagttttctaacctgaattattattgtttcagttatctgctaaatgtaagctctttgacggcagtatctatgtctattcatacttgtagccatcatagcatctgacacagtgcattgcatattgtaagagcccagtaaatgcttaatgagggtatatatggatcagattgcccagaaggaactctataaataatgattgaatatcttctttaataaaatgagggaactggatcagaaagtctaaaagaagttccctttattgctcaatttttatgatcctgtgatttagaaaaataattttaatgggcagtttcatagtttgaatgacatattattcaggctttttaaatataggtgttagaaatgaagcttaaagcagttggaagcaatagagaataaggcaggaattaagtacttctaattaacaatgctagataatgtcagtgactgtttcttgtatctgtactgtaaggacaaatgctgttcatagttgtaacttctaagacaaggctttgatttctttacagtattcttcacctacaccagaaccacttgtaaagaggcaagaatatttactaagagttgaatcatgatatgttttttttgcaatatattgtttaaggtttcttttaagtcctgcctctttcaggaagcctttacctaatagttcacttctctccaggaaaggactgatctttacatgtatatctttctgttactgtatttaggcccacaaaacccctaactagatattgcctatgggttaagaacagagtaaagatatgaagaactgttttcagacatgtaaaataaggtaatgtgaatcatgtagaagagacaatatctttattccttttactctcaaatcataaaaacgaaagttataggagggaagatttgacttaataatagggagaatgtttctgaaaggtagaactctttggaagggacatgatctactttctactgtgtgcactagtagtgcttaggcatcttgtaaggattgttgtgcagggagtttctctttcagcttgaaggtcagctaaatatatcatctgagaatctgtaattgaatttaacaaatattttagtgcatctttgcagtaggcattaaactctacataattaggtgatggctggtatctgttacagtctagcacaactggcttaggaggcaagtcttattcttgcagcactattcacagtcacaaaaatatggaattaacctaggtttccatcaatggatgattggataaagaaaatgtggtgtatgtatgtaacatggaatactattcagccataaaaaagaatgaaatcatgtctgttgcagcaacatggatagaactggatctcagctcactgcaacctctgcctccagggtgcaaacaattctcctgtcccagcctcccgagtagctgagattacaggcacctgccaccactcctagctaattttttgtatttttagtagagatggggtttcaccatgttggccaggctggtctcgaactcctgacctcatgacccgcccacctcggcctctcaaagtgctgggattacagacgtgagccaccatacctggcctggaggccattgtcttaagtgaaataacagaaacagaaagtcaaacaccacatgttctcaattctaagtgggagctaaataatatgtacacatggccagagggcatggaataagagtcattagagactcaggtgcgagggaggtgagagataagaaattatctaatgggtacagtcttcactattcgggtgatggttatgcaaaacaccatgtttagctttcccaaataatagcacagttattgaatgagggaaatgtggtataatggtagcagatttgtttaccagtgttggccagcaaccaggaaattagttggtcagtgagtcacaacattaatggggctgccaaaatatcctctaatgagctgttttgttgtattgaatgaagtaattaataatttttttaattataaatatttatattccaaatagaagtagaagttggtacttaatattgaacagactacaccaaagaagtaggttaagagagaatcttttaagagaaacaattttcttaggtactttaaaggagcattaataataaatacggggatagagagtaggaggtaagttggctattttagataacatgggcaggttaagttcttcctgagagacaacacttgaatggtagagaaagtggtcaactggagcagaatgccccatctgaaggaagaatctactctgctgcttcccagctgcagcttactgtcaccagtccagtgttgccaggactactatttttcaagagaaaccaagattccatgtttctttatgaaaatttttaaactgagcagataaacaagcatatctgaagaatagattatcttttctgtcagtttgtgacctgggtgatgctgtcttctgagtcctcagccctatgttggaacaaagaaaaaggctttgaagaaaccagagagctgctttaaatacttgtgggttatcaggtggaagacagatttgacttgttctatttccagaaggcagaacagagacaggcagattttcactcaaggaaacacttaacaattagagcagactagaaatagaataggatgtttgcttggaaattcttctgttcctggaaagtggtgttcaagctaatagtggatgatgagttgtcaaaagtgtctagggaagggtctaggtaagatgacatttcaagttcctttttatcttgaaattcttgaatcaccaagatctagatccctgttcagctcttctccatatcttcaccttcatgttcacagctgagttatcaccttcccatactaggaaagtcagtatgtaaagtcagtttcttaaaggcttggtttttctgtgtgtctgcttacataatgaaggttcattggtttacagttcttgtttaagatgtcctttgcatgttaggttcattggtttgcagttcttgattaaaatgtcctttgcatgttaagcagtcacaaaacttgaaattaaagcttttagagtctctgaagctataattgttttattctcccaactgcgcataaaacggtttgatagctagtgctttaactaaagctagttgtgttcgagttctaactttgcagctgtcttggagatctaatacattagcaaagtgaagtgaagtaaagatatatttttcaaaagtccttgagtgggattatcttacactttattatttatcttgatactaaagataagaaatagatctctgctatttcatttttctttactcagtatacataactttttgtcaagagttaatatagaagtatgtctgtttctctcataacccttgttttaatggttaacaattgtttatttcttatcaggatgagagttaatatattgccatccttgataagaactcttggtctaattttacttataactgctttaattactttataacacactaatgccataatctatataatgcttgcatgtccagtgcgtgtatttatttctagatcagtgattgtaataggtactaggtgcttaaaaatacctatactggaatataagcaattacattttttcaaaatgtatggagtctttattatgatactcatgaatgtttttaatgagaatatgataataaaccctacatctcttcctaaatctccgatcagtagtagtgtgacctggtgctacctatcagaagaatgagggccctcccttagcagtggagtactgaaaactgtatctctgcctctcctccttcacaccctccttcaattcatgatcctcagggagacttattttgcctagtttagttactgagtctggtggttgacctcttgagtaatgaaaggacattactgagaattttgagagtgctgagagtgagtggatacttttaaggttttctcttcaagcttttgttccctaatttggaaaggtaagtaatgtttgataatcttactaaattccacagttatttattctctcaaacccttcagaaaatacccaattgaataagatataaatgtttaaggaacttttttttctatgttgaaccagataaatctaagaaataaaagaaaagctacataatctgcagtataatattaatgaaaatacagcagagacttgcagttaccatgttaaggtacagatgatttcctaaatgaattcatttgtctatgatcagtaactaaagaagcagctagctggggtatctactcttgtaggggagcaggtagcctttctgggaggagagcacatattaactgacttaaacacctttgtttttttttttttctgtatttgctttaagtgatactgaatttgatggctttttctttggcttgctaaggataaaatgtagaaaatttaattctgcttggattaatgaacatatttttagaatcttgtacaaattgtagcactaatgaaaggtcctctgctccaggcataaggtttcatttaagaatgaaaaagcaaattgagctaatgtattgtgtaagaggtttgtagttaaatacataaaatgatgtcagtttgatttcagctggagctaaggtactctgatagctatgagatgttaaaataatagaaacatttaaagaagtatgatagctgaattttatataaataaagtagtttgattttttataactggtagcgtttattttacttcagtgatttggcagaggtactaagccaaataatttttaaattggttttatcttaaattggttatatctggtggtaacatttatggataattagagtcaaaataagcaattgtttcatccttttctactttaccatgttttaaacatttgagtttggaaaacttaaattatatacaaagtagaaaattagtataataaagactttaaatcacatttatcaatgcacagggaatcgtgttttaactatacccccaccaaacatatcttgcctcagattttaaagcaaattccaagtgtcaatcctttccttataaatatttcagtatgtatccttgagtaagtccataaggactaatttcttttagcataactataatgccattaaaacagctactttttagttgcagataagaagtagggtaggaattgctggggtctaacccagttctgatgacattaaatagatcctagatagttggacaaatcatttaactttcttctcttcctgctctcttgtcttttaaagggggaagctcaactaaattttctttaaaatcccatctgtctctgaaatttgttaatttaaaaaattagacttctagtttccagactagcatgtaaggagcttagaagtcattacgtcaaaaaataaacaggttaaaaagctgaacaaactgaaaaattaacagttcttcttagatctgttatagaagcaaggttacagggtaaaccactcccaccacccccagattgaagagacaggcaaatacagagaacaggagcagaagcctctgcaggaatcagcatcacagtaggaaaacctgaactgcaattgataaattgctggggctcaggatatacaagcttgagagtgaaaaactttaggggtgacgagtcatgagacctaatcataggactatagaatgctctaccctcccccgctttcttacccccactttcttagccctattttctgcagttccttttacccaattcaccatgtccagctctcaagaaaaaaattacaagtgtactagaaggcaaataatacacttcgaagagacagaacaagcaacagaaccagattcagatatggcagggctcttgaaattatcatatcaggaatttaaaacaactatcattaaaatactaagggctctagggataaagtagatgccatggaagagcagatgggcaatgtaagcagagaggtggaattctaagaaagaatcaaaaagaaatgccaaaggtgaaaaacagtgaaataaaaatgaagaatgttttaaatgagttcattggtagacttgacacagctgaggaaagaatctaaaaccttgagtatatgtcagtagaaacttccaagatagaaaagtaaagggaaaaaagactgaaataaactgaacagaatatccaagaactgtggaacaacaataggtgtatcatatgcatgatgagaataccaaacgaagtaaaaaaggaaaggaacagattaaatatttgaagcaggaacaacagaaattttcctgcaaattaatgtcccacactaaaccacagattcaggaagctcagaaagcattaggataaatgcaaaaaaaaaaaaaaaaagctacacatagtcatatcatattcaaattacagaaaatcagtgattaaaaatctggaatgaagcctgatggggtgtgcagggagacctgacttagagaattatatccaacatttcctcagaaaccatgcacacaataagagagtgaagtgaaataattagtgttgagagaaaaaaacttccagccaaaaattccataccctgcaaagttattcttcaaaagtgaagaagaggtaagactttctagctaaacaaaaattgagagaatttgttgccagcagatctgctttgcaataaatgttaaaagaagttcttcagagagaaggaaaatgacataggtcaaaaactgggatctccattaaaaaaggaagaacatcacagaagggataagtacaggtaaaattttaaattttttatttttcctatttttaatggacagatcaatctgtacaaaataatagcaacaatatattgtgtgcgtatacacacacacatatatatatacttatctaaaagtagaaagaaataacaacaatggtaccagggatgagatggaagaattagtattattttgttattaagtacttgtgttacctgtgaactggtatatatttgaaatatatttatttgaaagtaggcttcgattagttttaaaggtattttgcaaaccctaggagaatcatttttcaaaaagttaaagaagtatggccaggcagggtggctcatgcctgtaattccagcactttggggaggctgacatgggcagattgcttgagcccaggggttcaagaccagcctgggcaacatgttgaaaccccatctctaccaaaaaaaaaaaaaaaaaaaaattagccaggtgtcattgtatgtgcctgtagttccagctatttgggaggcagaggcaggaaggtgatttgcacctgggaggcataggttgcagtgaggcaagatgatgccactgctctccaacctaaaaaaaagtataactgataatctaagagagaaaatggaattatataaaatgctcaaaaccacaaaaggcagaaaaggagtgaaagtaaaaaataggaacaaagaacaagggcaacaaatagaaaattgtaacaaatcaatagataataattaaactatatttgaatgatcagtttgaatagcagtggcctaaatatacaaattaaatgtcaagagattgtcagcatggatgagaagcaagactcaactttatgttgtctataagaatcctactttaaatattaaaacacatgtagagtaaagataagttactggggaaagatatactatgctaacactaatccaaagaaagtgggagtacctatattaatttcacaaatagaagacttcacagcaaggaaagttgtcagagatgaagaggggcattacataatggtaaacgggtcaatacttcaagaagacgtagcaatccttaatgtgtatgtgcataacaacagcatatcaaaatatgtaggacaaaaacttacagaactataaagagaaatagatgatttggctattaaatagttagagacttcaggaccccctctatcagaaagtgatccagcaggcagaaaattagtgaggacatagttgacctcaacagaatcatcagtcagttgaatataattgaaatccgtttactacattatacaccaccaccacaaagcacattcttcttaagctcacatgaaacattcaccaaggtaaactgcattctggatcataaaacacaccttaactaattttaaaaatgctgtgcgaccacaatggagttaaactagaaattagtaacagaaagatagctgaaaatctcaaaatacttggagatttgacaacattattataaacacatgggtcaaagaagaaataccaagagagattttaaaatattttaaacaatgaaaacaaaaacacagcctatcagaatttgtgggatgcaacgaaaacagtgtttagaaggaaatttaaagcattgaatgcagaggttacagaagaagaaagatctaaaatcagtaatctaagcttctaccttagaaaagaagaaaaagacaagcaaatcaaattcaaagtaagcagaagtaaagaaatttaagaattagtgtatatattaatgaaataggaaacaggaaatcacagaaaatcaatgatctcaaaagctggttctttgaaaacatcaataaaatcaataagcctccaaaaaaagagagagaagacacacgttactaacatcagaaacaaaagagagggccaggtgtggtggctcaccctgtaatcccagcaatatgggaggcagaagcaggaggattgtttgaatccagactgggcaacacagtaacaccccatttctacaaaaaatagcctggtgccaccacatcacagttactcaggaggatcacttgagcctgggaaatggaggctgcagtgagctgtcatcataccattgcagtccagccttggcaacaaagtgagactctgtctcttaaaaaaaaaaaaaaaaaaaaaaaagaattgaaaaagaggctatcactacaaatattttgaacattaaaagggtaataaagaaatactataaacaacttcatgtcctagatgaaatgaaccaatttcttgaaagatacaacctgccaaaattcacacaagaaaaaatacacaaactaagtaggccttacatatatattaaagcggttgaatcagtaactaataactttccaaaacggaaagcaccaggcccagactggttcataagtgaattctgtacattaaagaagaaattataccaattttctctacagtcttttctagaagatagaagcagagagaatccattttaattcattctgtgaggccaccatcctaataccaaaaccagacaaagacattgcaagaaaagaaaactacacaccaaaaaatttcatataataggcgtaaaaaattttaacaaaatactagcaaatggattccaacagtgtgtagaaacaactatacaccatgaccaaatgggatttatcctgggtgtgcaaggctggttcagcattcaaaatttaattaatataattcatcccgtcaacaggctaaagaaaattctcaggatcatatcaataaagaaagggcacttgacaaaattcaacacctattcatgataaagacttggtaaactaggaatagaagagaacttccttaacaacattctgctcttacagcattgtactagaagtcctagctaatgtagtgagataggaaaaggggcaggggaaagtatactaattggaaaggaagaaattagactttcttcacaaatcatatgaccatttatgtagaaaaccgaaaagaatcgacaagaaacttctggaactaataagcaattatagcaaaattgcagtatacaagattaatatacaaatgtcaattgctttctatataccagcaacaaaaaagcagaatttatttatttgagatggagtctcggcctgttgcccaggctggaatgcagtggcacgatcttggctcactgcagcctctgcctcccaggttcaagcaatcctcccacctcagcctcccatgcagctgggattacaggtacatgccaccgtgcctggccgaaggaacatttttattaatcatggttatagtagtaggagttaattctggaaaggttaggttttgagattcagaccccttgaatgttggactgaagcagtctgtctagtgcttaagaatataaactcgatgcagactatttgagcttggatcttatctctgccaccttctataatagcgcagcttattctataatcgacataaatggtcatatgatttgtgaagaaagtctcatttcttcctttccaattagtataccttatctcccatcttctataatatagcacttaaatataggttacttaacctgtctttgccttgttcctcatgtgtcaggtagtgatagtaacactacctacctcatagggctgttacaagattaagagttcatccattaaagtttttagaacagtacctggcccacattaagcacttaatatgttggctattattcttggtggttgtgtggcgttttttttgttgtttttttgtttttttctttgagacagggtctcactctgtcacccagactgaagtgcagtggcataatcatggcctcaaccccctggggtcaagcagtcttcctgtcttatcctcctgagtagctaggactacaggcatgtgccactgcccctggcttatttacttatttcttttgtagagatgggatatccctatgttgcccaggttggtcttgaactccttgcctcaaggaatcctcctacctcagccttccaaagggctaagattactggtgtgagccactacacctggcctgtttacttcattttttaggcaatagttgacaagtttctgtatacataagaatcaaatacagagtttatgaaatgctggatcttattgccagagcttttgattgagtgggagctttcagttgagtatagatttggccagtgaatcataacaaatatgagggtaattttgctgcagtagcctacagcctttactttgagaaactgcagaatgttctagagattcagtgctgactttacaacaatggagtgggatgggacaagtggtctgttgggagaatttatctatttggtatcttcactgggaactggaagtgggtgaatagaaataaaagggttttgagatgagtgcttgagatacgacaaaggaagttttcacaggctttggtgtgaaaaaccactttgctattttgagcctttgtgactcaaagaagatggtacactgaagaaagaaaaagtcaggaagatgaatctgtttgctaaggatttattttgtttaatgtgattgaggtccactggggtcatgcttagtgagctgttcaaagatgctttcctgaatgtttctgcagcgggaaagccacagaagtagtaggttgtctaaaacaatagttgccaccagccagctttccagtttttcaggaaaatgctatgagtacaatatattaatatggatagatttaaatcattaaaaaaacttctctgatgcctgtgagctgtggtatatgtcagctgttaattttcttatccttttcttagataacattttatttaatagagctgtcttataagttgtaaagtgaggtttatagatttaccatcacttctgacatcttcagatctcctctttaaaagtacaaaatagaactttgcagtaaaaataaaatagtataaacagatttttttttagcctctgaaaaccactatatattagtttgcattaaccactatacgtagaaatatcttcctgttcaaatgtagttatgtgatactttgtgaaaatagggccttaatatttaggggttaaaattaattcaaaatattttcagtaagaatgggccaacttggcccacatactgtagtacaagctgataagtagtcattagaagatgatgatctaagactactaaataagctctcacagacaggtcatatgaaaccacgtttatatctaatgatttaagtgtaaagcatgtaggcaaacgctactagtcatcacactgtaatgtacagctttcagtacagaaaatttggataaatgttctgcagctatatccagaaatcagtttttcattaatttctctttctatgttttgtcagatacagtaattatatcacaagcagtcaaattctaaaatggtatgtgtagagaaaagaagcaacagagttcttgccattcctaattctgattaccctaatttgggataaatatttccttcttaattaattggttaatgcattaagattgtgagctgaaaggtatcataagtgcaattattatttgtatgaggattcttcgttcataattggcaaaaagtgaaacaaaaggaataaccaaaaatcataacaaatagcatcagcatttaaaagcaaatttctagaaatgattactataggactttaaacaaattttttacatcagtgatatgatttttaatatttttaatattcagaaggctttttatgtaagtgcatatatcaacattatcagttataccttcttactgataaattcctgctgtcagtctctccacagctctaccatgttctttttctccttactttctcgtctcaagttcattagttgagaaggatgcttactattactctgtccaaatttggtagtggttttctcaattttgggcatttcatgttcaattaaaatttatttaattgaacttttgaaagaactttcccagccatatagagatgtatttacattatagattcatttccagataacagtcacacagagacttcttttctgttacttttttcttgcctttgataatgacattaataatttaataataaactattaacatattaacagatataatagatgttaatattaatataatttatgtgtggttctataagaatagacacttcgatatcatgatagaaagattcttgattatgatgcaacttgaatatattaaacactaaactttcagcttatgatgccattaacagaacttttaacttatgatgcctttaatactttattcctgtgataagatgtgaatggaaggaaaaaataaatattactttttggtggaaaagtgtacccagttgtttattcatacagaaaataattattgaatgtcagtttctgtatgccaggcactgtttcaggcacctaggatactgtggtggaccaaaatcttatactcatatcttttctcccaagtgaattttgctatatcattattgtgctcctctataaagaattagaataacttcataataataaaaaattataagttgactccattaaaaaaaagctgaaaaacagctgattaaatcctattgtatgtaaaactgaattttgttttatgcgtgcttctagataaatagtgatagagttcttgagtgttttaatgaagtgttttaatgcaggtgaatgctttggactgatgtcaacagtgaatgttaatgatttttgagcatggttggcactatgaattggttgtttttaattttttgaaactaagtacattgacgcagatttatatgatctgatgatatcttattggctatgattaaccagaatatgtgatatttaaacgttgaaaatgcattaaaggatcaagaaaacagcttgtctttatgactttttttttttaagttttaaaaacactgagccaaattttggatttaacattcccaagctatggcctaagagaaagacaaatttaacagaatgagagtaaatgaagggctggcccatcagtgatctctttttataaatttacaacttccaagaaaagctaactaatagaagtatatcatgtcttgctttttcacaagatgtaaaatacgggaatacatgtagactaagaatggtaaatttttaagttacctcgtttgtaagggaaaaaagattccccttttttctcatttacatttaaaataaatcctcaatattatatggaactatttataatatagtgaaacccattttatttgaacatacaaatataaaaatttctggtagtctgcagctaatatgcactgtctgaagctaataggttgtgcagaatactgctgctatttgagtaaaagttaatgcttttgagaccagctaatacacttaactacactgtatgagctgtgggtgttccgcttatttttattacaggctttattactgtgcaattttgttgtacattaacaatcatccactttaaactagtgcttaaatacttattgaatgtggtagccaaagagcaaaaaaaagatctcaatgtaacatccaattgcttactaacataacctggattgtgatttatctctaattttatgacagtaatatttcagtatcaaactagaattctgaagagaataaagtttgcatcccccaaatgacacaattgtgcattagctctacttaactagacaaaatttaaaggcaaaaaattcttggtacgaaacagatactcccaaaatgatcaccctatgtgtgtccaaaggagttctcactatattgtgtaagtcttcttccctccattatttaaatagttataaattttcattttattatgtgtatattagactatatattttataattttcctctctgtaaatgtacaaatatgcaaacttgtataaattaggtaattgcataaaaattgaaaggcataaagatgtactactgagttcaggaaacagttggattgggggtgtgtttaataagtagcacaattaagatgtgagaaggaaaaactgaagaaaaggaaattctctcagtgtaatgctttattagctccaattttccccttgtctcttatctgaagcaagtgatttttttccatttgcttaaaaataaagcatttgcgcacagaatgttagctcattaaaaagacctttattgccataaatcgctgcatcatttgcatatccagattcacagaatcaaattacagttcaaccaagtatttagtatctggaaagcagtcttggtttcatgtctacttattttcccaaaactcttgttaattctccttatagttgttttcttagtggctgaaattaagtgatgtctagtaaataagccagattgcttcttaaataaaatctggcctgttatttatgtccccacctattgtttcaaactctataatttgaacttacacacttgaaatcaatagtaatagttatggtgatagggacaggtgatgggataaggattttattagtagaatcagtcatgagtctaaaactgcactgctagatacaacacacaataataactgctagagataatacttaaccgtaacctgcagagtaaatattcttaatcctagtttacagaataaaaagcttggagataaaagttaagttacttggtgtgaggtctgattcacacagccagtaagtggtggttttggtcacttcctcctcacccctttgacaagggaaggattcctgccatagggttatgaggatggctgaacacgtcagttgggctcagcagcagttagttacctatgttcacagctaaggcaaagaggaccctgtgcctcaagtggggtcacgtggagttgcacttgggaacagagtaaacaactaggagctatgggaggcaggctttgtagtatcaagagggtgggggtatcccctggttcccatggaaggatgtgattggcttgtttgaataattcctcaagctgacaagaaactgaaacctactattcaaggataaggaagaactgcatctggcccctttggtaaggtggatggtttcgctaggggcctttattcatgagagcagagtggagaggggaacgtatgggttacgtcggtggtccccaacctttttggcaccaaggtctggttttgtggaagacagttattccacggcaggggcggggcaggctggtttggggatgaaactcttctgcctcagatcatcaagcgttagttagattctcataaggagcgcacagtctagatacctcgcacgcacagttcacaataggatccccactgctatgaggatctaatgccactgctgatctgacagaggtggaactcaggcaacaatgcttgctccccagccgctcacctcctgctgtgcggcccagttcctaacaggctacagactgttagcagtctgtggcccagggtttggggatccctgggttagatcattcaaggccttcccgattttaccaggtgtcaaagcggcacatgatattgaaccttaattttaggtgttataccacagtggctaaactagagttctgattgtgaactttcatgactccagtgcccaggttcattctgctgttccatgatatttttcttcttgccagaatgacatgttaacatttcgttagtaattgagtactttgctttcactgggcatttcttagtcctgcgttcttcagaattcgtacactgtagcatctgttgtattctcatagaaaactggagcgctctcatttagaagacatttgaagatttgttttcctttaaaggaaaatctgagtataagttctaattatatcttgatttacagaagattttttttttttcctattctcaaagctgcagtgagctgcgattgagccgctacactccaaccttggtgacagggcaagatgctgtcccaaaaaacaaaaacaaaaactatactccctccccaaaacaaaatcttatttttccatgttccatcttatttttattagaacgtcttaagttccccctctgcagccatgaaactggcataccacaggtctggaatgcctctctgtctctccatttgtatctccgacattagaccatttcagccactcctgcatgcagttacacccacctcatttttatcacagttagggaatgtttcacagagtattttgcataatactatgagctgggtgctacaagacatttaaaaaataatagctggtttctgccattgacactctcactgtggagaacaagacataagagttgtgtagtgtaaaggtaaatcagtacacatagaacccagactcctaacccaggcccacaggccatacgtgagctggcccctgcctgcttctggaggctcatctcttgttctttctccctttcacttgactctggccacgttggccttccttccacttcccacacacgccaggtttttctcatcccagggcctttctccttgtagtttacttggcctgaaaaactcatccttacatgtctgactctcttttttcaggtctcattgcaactactatttatagggatagttcttccttgaccatgccacctaaaactggcccttttgacttttccatgcatagtaggtcccatgccacccacttaatacctgtgtaatttttccaagatgtttaatttctctgtgccacagtttgctaatctgtaaatccaggagtattttaatagattaggtttttgtgacagttaaatgcattaatatcatgtaaagtgctaattataagaatctctggcatatagtgattgctcagcaaatgcaatcagtttctgaccttcatcttcatcattaagggtaaaagaagtagtgtaaaacgtaagtactataggagctcagaaaggagaggaatgccggaggccctgaatcaccatgaacactttccttgtgacagtagaatcgaacctcactgcttctgtatagtgtctggcatgtttccgtcagacaggcactccctcctcctttggatttctacgtccttttggttctttgtgtgatacttgtatcgtagattgtgtatatgttctcacagaaaaggtcatcctgcatctctgcatcctcagcattgtgtgccgcacacaggacaggtggccacttatttgattaacatgagaaaaacacagagattccatgaaatcagcaagttttaaacaccctcagtgtgggcagtaaatgcagtatgagcacagtgactacaaagatcagttactggaaatgaccaagttggaacagtgaggggcagactattgtatggtcttaaattggctttagagtcagattaattcagcagatttgaagagcatcatttcatgccagtgtctaagctcagattgtaggatcacaaacatgaaccagtacaggtttctgtaaagcattttaacttgattcaggtgggacttcagtgagtaaagcaagaaaggtgttccagacaagcttcagaaagagcaaaagtaaaggtgcagagttgagaaggttcaggaattcaggttctctagagaaaagatttcctcatgctggagcaagaggaaataaggctgaagtgagggggtccaaattatggaggatttagggtaccagaaccagaacatcagctttattccataggagcctgtggaaggtttgagcaaaggattggcagaaatagtactcaaaattagatgatacatttctgtattttctgtagtgatagaagttccttgaacttaaatttgaaaaggtttgaattaaaagggacagatgttctcaagttatatactagacattttcagtagttgtacggtttttgagcttttattagttggtcctaagtaagttttatagcattatgataggcagttggtgacagcttagtcatgtgttctttcttgagtaataattaaagtattaatatttttccttttcattatattttatgcatcatggtttgatatatgcttgaaatatttactaaattagatattgctgcatgtggtccatcccacatataaatggaaaagagaaacttaacatagttcataaattaaaatatttggtttcagctgtattcatattgaaaccataaaagaatcagaattactgtgggtttatgattgtcaggttaccaccatcactacaaattttctgataacaacatattagtattctgataaggtttgtggcttctttgcaaggatatttgaatactactcaacacactacataatggttaactattgttgtctttattttaaggaaggcatgaatattgttagatttgcccctaagtaattgagtgatcatttttatatacaagaaaatcagagtagaatgcaaaatttggaacaggaactcaataatacttataaataagttgattcaaagaaatgtttcaatttcttgacattgaattcatgatgttttgcttttaacatgtgatttttaaaaaatactgttatgtgtacaggggaaggctaacctgagactttcccttcatgcgtattcttcctgtgcactgcaaaaggaaactgtgtgactgctttccttcctgactggccatcacatagggttactggcagatgccaggaatccaaggactaaaggaataaagggtgtgtgttatagtacctgcgctaagagatactgtcaaactcagaggcacccctcctcctccatgtcttaaccctagaattgttttagaacttcttatggataagtgtttggattaagggagatctgggaaatgggatttgaattttaagcaagtgagccctggggatggctagctgcccaaagtctctaggaccccaaagagattatgagagagaacgttgagaggtctggaatgaattatacatactcttataatgaactttctccagcttgtccttgagcagctgtctccatcccatccctcaagtgctttggaacccacatcttataacaatggaaagatagataaccttttattttaatgtgtttatttttattttaatgtatttaagtagtttaaacactttcagcgaaaacgcattgtatttctcactccattcctcaatccagatgtataactaaagtaccatagtgctgtccattattagcccattttgtgttttaacctatacagtttgaggaacaagaaacctacctgacatcaagattatactatcagtgaagccagagaagctatacttattcattgtagacattcttatctttttaaattttttatattaaaaaaaaaaaagaggctgggcattgtgtatcacgcctgtaatcccagtgctttgggaggccgaggtgggtggatcacgaacgaggtcaggagttcaagaccagcctggccaagatggtgaaaccccatctctactaaaaatacaaaaattagccaggtgcagtggcaggtgcctgtaatcccagctactcggagggctgacgcaggagaatcgcttgaactcaggggtcggaggttgcagtgagccaagatcacgccactgcactctagcctgagtgacagagtgagactctgtctcaaaagaaaaaaaggaaaaataatggggtctcactatgttgcccaggctggtctcaaactcctggactcaagcaatccttgcatctcgtcctcccaaagtgctgagattacaggcatgggccattgtacccggctatcttatcttctttatatagatatctaataagatgtaaaatactgacctgcattatctccatgttaacatttacacttcaaaatctgtaaacggacccacgttcatacgcgtgaacagaaatctttcagcaacaaaagagaaaattgtatttctcgatagaaaggaagtggtcagatcatgccagccaaacaaatctgtcaggctttgaaatatagaaccgttaggtaagatactgagaaaaaggataaagtaagatcagcctaaatgtttcagtctagttaagttgatttgtatattacttagaaatttcattttcagggaaatagttttcagatttaaataactgtaaagagctgagttattctttgacttggatttaaaaaaaaagaaaaaaagtgtcctgaagtcatttcctgccagtttgtccccccaactttttttcctgctcttcctgtaactggttcttgttacggcaatgtagctgtatatttaaatcctaagagactcgcttattgtgagtaggcagggtcagtagtctgctgaaacaagcacaggaaacttgaaacacctaggggctattttaaaaatcccttgccactgacattttagttagaattctaaagagagaatgggctgtttggatactgagctccagtacaaaagagctggggtttttacaccgacttgcaaaccactaaaatcatttgacctggtgttgtgtcacttgggtattctgaagcatcagatgaaaactaatatccaccctgcaaggttggcaggcaacaattgtacctgtgaagtgagcatctatcaaagaattggggaaggaaggccgggcgcagtggctcacgcctgtaatcccagccagtactttgggaggccaaggcgggcagatcacgacgtcatgagatcgagaccgtcctggctaacacagtgaaaccacgtctctactaaaaatccaaaaaaaaaaaaaaaaaaaaattagctgggcatggtggcgggcgcctgtagtcccagctactcgggaggctgaggccagggaatggcgtgaacccgggaggcagagcttgcagtgagccgagatcgcgccactgcactccagcctgggcgacaaagcgagactccgtctcaaaaaaaaaaaaaaaagaattgggtaaggaaacttaatgtgtggaggagatgccaccatctctgaagcacagactttgttagaggagctcactgacttgttcctaatagtcatgtggttggggcaggcctctagcactgctgacaggtagcattgattctgtctcatctttaagttatagcgtattcagtattgctttatgctattatttttgaaaggaagttgttaactgtacaacactttaggtgatattatgagctaactattttaaatatatcattttttttaattaccaaaagcagtgtcagaaaatgaaactcttcatttgggtcgtttaaaacacatttgcttttggtgtaccacttatattcaaagacgtttcatatttatttaagtactttaagaatgttattacaaagccttgctttgtgatttaaattgaagttccctagtgttcatattgttagttagaaatttagattttagttctgtgacttttatattgttgattgtaactttggacttatgtggcctgtgtaatacatgctacaaaaataaaatctgggagtaaaagaacatatgtatattttaataaagacctcattaaacattagtaacaataggataaggaatattaactgaaacagacaggaaatcagggtgaagatcaggcagaactgatccttttatttacaccaaactaaatgcactaaagagaagttttaatgaacttaaggagaataccaaaacatttctaaatttaaaaaaaaaaatgaatcctgctactgatgggtatatagcattaatctcccacccaaccccccaaaaaggacttgtctggcttcttgtaagagagggtgatatttcataccttaatcttgtgattaattccaagtattaagatctgtcttctgatcctaagtgttcgtaaagacatataaagcatttttatgaactcttatgccctcctatgtgtaaggaagaaagtcttactatgaagtatagttttaagtatactaaattaaaatgccttacataaggcactgagctttctgtgttgttttctataagatcttataaaagcctgttttatgagcttttattttttgatgtcagagcgttttttaaaatccaaaagaaattttcaaaaggtagaattttgtaagtgaataacttagccagccagatcatcctttcctcagtctgtatccactaccagtttgccttccagagatgcatagataagggggcgtggttactgattcttctgctttcctgtagctctgcctggggtttcccctcagaggaatgtggtttgaaaaacttcctccatcactactttgtttgcagtatgtattatttaattttctttgataatatatcaaatatctatattaataattgaaccaaatttagtaatttaaaattaacagcttgtatattagatgtatattacctgtgtcccctactaaactccctcacaataacaacagtactttccagttttctactcacctctctggccacacagcattcttcttttctggccattatccctctcgtggccattaatggaccaagtgttaggtcttcttctcttttctcttcctactctgtctttccctctgagtgatctcatctctgcctgtggtttcacttaccacctctgaactccagaggaatgacctcaaatatcataaaggcaccacagactattagatctgtcttagctcagcttccccactaagaagagccggaagcagagcagcatgtgctgtttattagggaacataatcccaagaagtagagtgagaaacaaggagaatatggtttggtaggggtggagagtcaatacatggataagctattgtggtacctgccaccactcagtcctgtaggttcgttcctgaaaactctcataaactgtgctttaagactgtaccttgtgagagaagaaaggaggaagaattttttcattagtttctgtctcccattggccaaagattcatctttcagtatattaattcctccatgggggtatgcaagtggggaatccaaagcagcgtcaacgcagatgccatagagtacaaggcaagaactgccccccgaggcatgaggcagggaactgtcagatgtacctatgtgaaattggtgctggttagacagctggactaagatacaagtaaggttgagaagatctgaatgatgcataaaagatgcccagtataatacacccctttaaccactgagatccattcaggctctacattatacgtagcttccatactacgatatgaggcctccatttttgtgagaataagatgccttcacttcatccctgagatcagaggttatgtgcaatcagtaactgaatccccttcaaggtggagccctgccacactgtccgaaagactttagacgggacagttagagaaacaaattacagtcccttctgctgcagctgaccgtgaggcagtaattgatacacatcttctatcactcattttaggttttcttcaccagttttgtttttttttttttttttgccagcttgtgttgcttgcctgctgaaataaaatatgacttatgtccctcaaatgtctgagcccttagttgccttgctgttgttgatccatggttgttgaaatatcccatttattgtaaccgctggctatggaagcaccacgagataccccagtgaatctctcaagttctggacatatttcttcttcccccattgtgtagctgcagtctttgcttcttgtggtggtccagattgaatattcctagcagtaacctgactcccttttttctactgatgtactggcttgaggaattcaaagtatcccagcagtatagtcagatcttcaagtttattggaactcttacatgtccactggtggaaacaatcaccccttaaccccatctggaagtcagaacctctaccttagtagagatgaaagtaggatgggtagaaaacacaagtttcacaaagtcaaccctactgtcatccttcagttcccagacctaagtattgaagctgtttataacacagcaccctgtaatggccattgcttcaatgcatatgcatataccataccctggagggcagtgctccaacactgcaggaagtcatcttcaagatgtctcttcagctgatattttttaataggctattctgcctacctattgggccagctgttatttgtgaatggagtgtacggtaaagcaaatggattctaaggggatgtgcccattgtcatacttctttagttataagatgggtactttgggcctaagacagtgtttggtgggatgccatgttgatagatcagttattttataagccctggaatggtggtggtagcagaggtattgggagctggaactaaatccatgttcagattaggtattaattctgtaaagacaaatcattgccaccctgccaccaactcttttactccctctacctccccactcccatgtaatcttatgccaagtgatcggtttccttgagtaatgatgtcatattgagtggttgtcatcagtctctttcattggcagtttacgcatttagcaatagcttttcaacattggtgagaggaagcaccttggccactctattatgggctcactatgtcaactctgtggtggcccaagtggaaggctggctgacagccatagaataaagtatcctattcacctcattgttgatattagacaacacacatgttgacatgctccattttggtagatacctcctggtagttattgtgagacacacaaatgcccctgatttgtgcccaattcatttttccagacctccttatcacatcatctttcactgttgttttctaggcccctgatcaaacagccagacaccatttaccactgccaatgaatcagagtatatctgtagctcaggtcatttctccctccatttgaaatggatgaccaccacatatactgctccggttgttctcatctgccaaacttcttttaccacagttctttaggtctgctcctgaataaggctgcagtgcaacagcagttcatatttggctagatcggaaatcctttttgccttgacagttggtcatgaaggagaaaggcgttagtgatgtgggagtctgagttacctgtgaatgtaattttttcatgcctcctgaatgtgcctgtgcctaatcccaaatataccatttccatcatacaacgggttgtttctctgcccgtcttgctactcagtgggtactttaagtcacagacttatttgttggcacatagtgaggcatgcaaattctcttagggccctgtaacatactaggatttgtttttctagcagaaagttcttctctgccactgaaccccaaggatcagcattgtgacttctcttttggtgcttgccagagactccacagcatttttatccgtcaatgataggtcttcagcctgggggaacagagagagaccccatttcttaaacagagaaaaaaaataggtcttgtaccatgagatccattggtcacagatgcaccatagctgggacctgctacagagtcttctttatcacactcggtcactcttgaaactggcatccttcggggtctctgataaatggatcaaaacggtgttaaaagtactgcatataaatatacagcctccaggatcaaagaaggtccacctttttcttaacagtagatttgagagatgcaaaaacttgtttaccttaaagaggatgttctcagcatggcctggagccctgaactccttaaaaagtttggcagtgtgtgcccataacccttaatttttgtgaaatgtctgctatgtgtattttacttaagctggctagggtactttccattttgtgctaaccagatgcagttagtatgctatcatgaatataatggaatgtgaagatatcccggctgactgaattttgagtgagatcgtaagagttaacattgccctggggaaggatattatggtctctttgccattgtgaaagttacctgcctttcatcttccctactgatagggactgagaagaaagcattcaccatatcagtagctgagtaccaaattgataccatatctggcatgccagttactactggggattctaccagtttaaggttacagttattcattatccgtctgtttggtttttttttttttttttttttatccgtagggtcataaaaggtatagaaagagaatatggtgaggaccaccacccctgcatctttaagtctttgatagtgctcttctctgtagttcccgagacttgggtcaaaactttattaattaattggcctccataaaccctcactctgaccagaagagcgtgctggcatttcaggtcccccagtattggtgtagtttagaactcaattgtaataggcctcaaaaagtttgggatttccctttccccagtgcagttatccatgcaaaacagtccttacatgctgtttcctctgcctgacacatttcattctccctgctttccttaggtattatctgatttccctgactaggtcagatcagccatatgttactaaatgatgtgcatctttttttcagtacttacaacagtagtagttttatattaattttctgtgtttatttaattaatgccagtctctatgtaagttccctgagagtagtgtcattacctgtttgtgcactgccctgtcccttggtgcctgtgtcacatattaggtgattaataactatttgaggaatgaatagttagatgggtgaaaggaagtgaaagaaaagcattttgtcccaacatcaggagccctgttattgtatctcatcagttctaagaagcctatttttacatattttaacctttctgatatcaattactttgggacaagtagttattgtgagttagttgtagttatgcattctttaaaaatcttgcaaaaagaatgtcagcagtttggaagaaaattccaggggcagttgtggagagaaatttcaagatacactacctcaacaatgctcttgatggcacaaaggactacattttgtggaaaaacaattatctctgagctgaaaaatgattcagaagaattaaactccaagtgtgaagaagttttagtaattctttttttgttcatgtaatcctttctttgtgctcaagtgtgatatatagcaaacatgactgttacacttatcaagagacccctttcaagaagagtaatataatttttgtgtgataagaaatcactatattacagcctaatttagtgagcttttctcagtggtttgtaaagtgatggtgcaccttattttatagtcaatgaaatatggtattacatggttgtcttcagagcctttattaacattcatggcattttgtgtgaattagaaaaatgtattcctttctgcaggccaaaacagccttgcagctgcatgtgaggaagaaaggttattaggaaactttgacagtatagcaaagtaaatataaaatcaatgttcagaggagtaagtttctgtttttaaaaattatctctttaattaaaggcagtatttttttttctaatggataagccagttgtgaagaagtttttatctgtggatatcagggtcttttagggtagacaggaagtctaacagagtttaattttgactgagtctgtcgaggttagtgaccccgtaatcttttcagaatgaagctcttgccacgaagccttccagttccacccctaggaacttaggtcaactcctgaaaggcatttctgtttttgatgtttgatgtaaatctttattcttacatctttggcaatgtttttgtttgaccatatactctggaactacttttcacactgatagtgtcaaaaatttaattttcacaactagcagcaggtaagcctaacttacccatgttatggagatttggaatactattaggaatagtctactaagttagtattttttaatacatgacctaatatgaggattctgattggaagctaattgggaatgatattagttcctgtcgtgaaagtatttcaacttttacagtaacattaaatacttgggatctagatattttctatttaaaataaatttctctcaccaattggagggtgataatttgtaattcaaatgtgttacctaattttgtataaaataccttttcctggttatgtttcctttctttatcctcatctttcttgtaatgtagacagaaaagtgcagtttgtagtaagctgacctctgaattgctctttgggagcgtagttacaagggattaaaggggccctctgcaactccagagattaggagattaagtcaggcagatccaggatctctggtacctggtgggaaaaataatgtcacaaattttagtgcacagttccatctgtttacttcttctgtctcctttcttggagttcaccacaaacttatattttctggtttttcaatggcttttagaaatgtaatatccatcatccatagagttctattgaattgccctcttacctaacagcccaaaggtatactatggcatgccattgtaagtatactagcagaaagagtttaaactggaaaaatttagggtaactcttatggcattacagaacgtcagtaggaatacacctatcactttccattgaactgtgtgtgctgcagcccaaacaatgaaaatgctcattttgtagaagtgaaaacatttggtaagtgtaagggggatttttattgttagccacatttttagatatcaacagactgcttacatggatttcttaaaaattttttggagaataaaacaacagatctttgtttccattgaccattacatcatcattattttagtaccaaatctcagaatgttcacaagaagtaactggatggaatttaaatatttgcttcttattttcaactctgattttaaaaattcggatggggtaagaatgagaagctgtggaacttggtgaggtttttgttatatctgattacatttgctcttttcaccactgtctgttactgataattaaaagacaattatccttattttttatcctgattggaaaaaccattatctggttcaatctaatcttttcagcatttaataagattgaaaattcttatgacagttctggtaatactgcaggtgattttttcctaggggactcaggggcagacagaatcaatcacacatcatgattcatcagttctaaaaacttatctcatataattctgttttgaattaactaaataatccagtaagcagtgtttttaatatctcaacggggaaaagttttaaagctggctaacaatgaaatttcccatttttcactggcagaaaccccagccctataatggggaaggtcccaccagtgcggaggccccacatggggacccctccccctagtgaggaaatgtacccctgaagaggcatcctcctggccactgggcccactgctaccctgccacgtgagtacagcaatggctttgaggacctcagcaattttttcatttattggtggccatttgtctgttatgggaattggccaggccgtcttccttttcatcccttaaacatttcagaaaatgagataaaagcctgcttttatccccttgcttcttttttgcaagtttaataaaaagaatttgtttggataaagaggttaggactattgggtagaactcagttaagtgtgattagtgaaacaatctgttcatatctagagcagtacttttcagtacaactttctgcactgatggaaatgttctctctctgtgcttccaacattgtaacactaacctcatgtggctactgagtccttgacgtgtggttctagtacaactgaagaatttaattttaattaattttaattaattttgctacatgtggctagtggctactaaatggggcagttcatgtctatatttaatgctgtgtgcctcttttaacattgctatagatacacctctttacctctttcattatcatctcagaaaaatttgccttgtattatattactagaaatatgattctttaaaagtgaggaaataaattaagaattctgatatcaaaatgtattcaccaacattgcccttatgtagttttagttaccttatgatattaagaaaatttatttaattttaaaattatgaagtatctatttaaatattccggctttattttctactttacgttttaatttgcaacttaatatgtatatagaagtaattacacacattaaaataactttttcattttatttctttttaatgagaatataaaacaccttacattagtatagtatgtgcagtgctattactaaaacaataaatttagcacttactaattataatatggtatttacaagtttcaaagttttattccagtaggtgggttactgaaattacagattaattaaatttgtagttttactggctgagaataaatgactttccactattgagctatcactaaaagttgctgacatcataaaatgttaataagagaaacttcttggaagatttgggaactttttgtactatctttgcaatttttctgtaaatctgcaactattgtaaaactttttaaatgtttattaactgggcacggtggtgcacacttgtattggaggctgaggtgggaggatccgttgagcccaggagtttgagtttagcctgagcaacatagcctctcctcttaaaagcaaataaataattttttttgaaaaattgctcatgtcaaatttgtcctgctatccatttagattcattaatttagctgtatatgcatctaaaataagaattcttagatcagtaatagaggtagtacttacctaagtctcattacatggcatcctcgaaacatcctgagcaatacttataattttacagatgaggaggctgaggcatggaataaagagtaatttgagcagggttgctgagctgatcggtgtggcaggtctgcaattgatagccaggaaatttaggtcttcagtgagcgcttctgacgactataccgtgttatctcttaaggagtcttgattatgtaatgtaagattttgtctctctgctatcagtgtagtaagatgtactttttgctataagaaatccaaaataagctaatatcctggtaataaagtacttttacaacatgaaaagtatagaggtatgctttatttctatttcagtaattcaaacttgattctcatacaatcgttagttatttttatgagcgaggaatatgttcatagtctctcaacaagaaatctctatgttggtggagttttaaaaaatatatttatgcttccctaagatagtggccaagtttgaaaaaaatagagcagtacctaaagggtaagagggatggatgttgttgcttatctcataaagataaatttttatcatttttattgaattattacagggttgttttaccatcaacctgttaatgttattcttactggaaattaaattatagagatttaattgttaaaatctaaatatggaaaaggttggtggtgagttttcaacaattctttgagatgtttttctgggctttggagagtatttctttggctgaaagtggggaagaaaaaggatggagttacttgcatagttcaaaaattgttgcagctggaatatgttagttcatatcctcatttaatgaatgttctatatccactggtgaattcacactttcaacagcacgatatatctagctactgtgtggatttaaggtcctacatttacttgtcagcaagagacacagtaggaagttctttaagaaaatgtgaatcataaacaggtgcaatttttatacagaatcttttttttttctgttagtgagtagacttttgaaccagctgacagtcctccattgactcttccaaagtatttgaatttggaacatggtgttttcttgataagaatgtatgttttgaatctatattaaaatttttgagagactttagaaagtttagtgtaaaagtcgtgtttataaaatatgggaattctagtgcacactgaccagttaaaatttatattcagattgttgatttagaataacactgtaacttgatcctagttataatctttattaggctaggtgataactgttacccaaatggttgagttgctactgcataattctgtgttggtcaaagatgagaacaactttatccctgatgggagaaagacattttaatgttatcattctgtgaaaaggagggtatgtcaggaggtctggtgagggcagtagggaggaaaaagacttgaaggaccataatttactacaaaatgcctatgatctaacagagttaggatggacaagttctttttatgccgtctcttgagttctgttctccacagcacgctggcacacccctttactcaaatagcaactatgtattctggatttcctggaacaggccaactttttggtatttcatcctgtttttcccataagtgcactaatactgcttagactctatgtcccatttttaatagtatccttagaaaaataactgctcttcaaagtaaatgataggtaaaatattttggagcatttggcagtggggaaataataagtattcttaaggcttaggcaccgaagtttgaatgtgccttcctataactggcaagtgctacttctggtagagtatcctaatggtttaatatataccattttaaatatgtcagttaaatcaacgtagttgtggtgttttcaacttatttaaaatattgaattttttgttaaaatgagcaactattttttaattcatccatttccgttggaaacaatatgtttggaggctctccatttgtttctgtttttttttgtggtgaggaaagaaaaaaatactttatatctttaacctgttttttaaaaagaaagttggcatgaatatgtcttaagggaagttaaacagaatatatacccaaagtattaacaaatgaaaaacaaagactacagttttagcctactttctctttccacatatttcacttctcatttaaaaattgtatgcatctttgaagactagaactgaggtgcttacaacagtggtttgaggatattttaaaatccctttttatatatttctgaatctggaaagggaatcattgatgatcttaataaaatataaatcaagatattgcatattaacgactttataaaacaaactgtgaatacatttgtcattatagattttcctaaccctctgcaaccaacagagctttcttgtagagcagtgtattacagctttcctttcaaaatgtatttgtacattggccaaggaagcatctcttcattgtgaagatgttacaaatatcttgataggggaagaaactttttctgagcttattatagtggtgctagttaccttttaaagaagatacacgtctagtagtaaacacctagaatgtctgctataaaataacttaaaggtatagttttctatactctttaattttacagaagggaggcagcattctgagatatttgcatattgtgtaagattatgttgctaaatgtaagtatttaatttgttagaatcatagactcctagaacttgaggaataagaggagacttgttttacctttgtcagttttgttctgtttgaatttttaagaagctaatgaatttttagatccccattagttgctctttaaattattttaatactttataaactgattttttaaattttaacagtacttaaatgtaataactttataccatgtgtttattagttattaacttacagtagaaaatctacttgaaacagcttattattttaaaagaacaaaacgctttgaaaaagaatggtttattttaaaaggtgccacccatgaatgcaatccatattttaaaagctgagagttgggtaagacctttaagggaggtctcatgtctgagcgctttccatctacctgctgaagtctgatttaagtctcatctgctaccttgtatctttagtctcataaagaactttaagacaaaaattatggaataaattgccagaaaagctaagagaagttttgcttacagtacaagaaatacctcatataacacagactgtgtttcatcctgctaatgggatagcccaacagctttcttccatccgtgtgtgatgtctgggtatgcctatatgagaaataatacgtgaatatgcacctagaataacagctcttttaaagttttgtttgaactaagtgcaagtttggcaagatgccatactattttttgatagcatacaaattcaagcactaaaataaaagactacctcctggtaaagtgttgtacagtgtacttcctaatttagctgaagctaaactcaaaatttgaactttgcatagaaaatgttaggaattttttttgtctgtttaccttacgttttgcagtattttgtttctttatgggtgtatccgagattatgaaaagtcattgaagccaagtgtggggacttgatccctaagcagaattcactggattatcatgtcttcctgcctaacccaggtctctgcatgacaagaatagttttaatgcagattttgctctcttctctttctgagagacctgaaaagtttagctttccaaaggcttccctgcatgcgaggtaaatagatggagcagaactatcaacaatctataattaagcagcttgactacctgtcaataggaaatgccctctgtgtctaccacacaagtgaattacaggaacctcagagatactgcaggttcggctcgagaccacagcaataaagcagatgttgcaacacagtgagtcacacaaattttttggtttcccagtgcatccaaaaattatgtttatactgtattgtagccaattaagtgtgcagtgactttatgtctaaagaggacaatgcatataccttaataacaagtacattattgggctaagcacagtggctcattcctgtaatcccagcactttgggaggcaaatgcaggaggatcacttaaggctaggagttcaagaccagcctggtcaacataatgagacccccatttctacaaaaaattagccgggctaattttttaagttttcagcttaggcggaggatcacttgagcccaggagttcaaggctgctatgagctgggatcacgccactgcactccagtgtaagcaacagagcgagaccctgtctcttaaaaagaaaaataagaaaactttattactgaaagatcctaacgatcatctgagcctttagggagtcataatctttttgctggtgaagggtctttccttgatgtggatggctgctcactgatcaaggtggtggttgctgaaggctggagtagctgtggtaatttcttacaataaaacaacgatgaaatttgttgcatcagttgactcatcctttcacaaaagatttctctgtagcatgaacagttgtttggcagtattttacccacaatgtaacttctttcaaaattggagtcagtcctctcaaactctgccacggctttatcaactgatattatgtaatattctgaatcctttgttgacattgcaacagtgttcatagcatctttaccaggagtagattccatcttaagtaatcactttctttgcttattcctaagaagcaactcttcatttgttcaagtttgatcataagattgcagcaaatcaatatctttaggctccacttataattctagttctcttgctatttctaccatctttgcagttacttcctccattgaaatcaaacccctcaaatcatccatgagagttggaatcaacttctatcaagctcctatcaacttgatattttgacctcatctcatgatcacgaatgttcttaatggcgtctagaatggtgaatccattccacaagattttcagttgactttgcccagatccatcagaggaatcactgcgaatgggagctattgccttacaaaatgtatttcttcaataataacacttgaaagtcaaaattactctttggtttatgggctacagaatggttgttgagttagcaggtatgaaagcaacattcatctccttatacatctccaccagagctcttcggtgaccaggtgcattgtcagtgagcagtagtgttttgaagagaatcttgtttttgaacagtaggtctcaacagtggactttaaaaatattcagtaaactgtgcagtaaacaagtgtgctgtcatcgcagctttatatagcgtaggtaaagttgatttagcataattatttaaggccctaggatttttggattagtaagtgagcattggcttcaacttaaatgtcaccatctgcattagcccctaacaagagggtcagcctgtcctttgaagctttgaagccaggagctgacttctcctctctagctcggaaagtcctagatggcctcttcttccaaaagaaggctgtttgttacccacacaatgggtgggtttgattgcttggtggatgacagtccatttaccataatcgaggattcagcaaggagattttattacttgtaataagaagaatgctgaggatagttcccaaagcaaaaccttcctgaacaatggtgaaaacaagcttttattgggctggttaactgagtcattgtatgttgaggtggagtaaaggcagcacccgagcagtccctgatgatgcttctatatatgctgcgtgtatagaaaatgggggctaagcttctctctgggcagggattttagtatgcattgaagggagtttgccaaagttcatctgcaactgacgcatctctagatccaactggtttttctggggctaagcttcttcctggaagtttttttgaaataacaaaagctcaaggtataacacttacaagtgagtgctttttcacagtggatacccaaaaacccagggaccctaagctacattttgtctgcactgaaaatctagacttaaatagccaccttcatcagtgatcttagctagatattctggataacttgctgcagcttctccatcagctgctgctgcttcatcttgcacttttttttgttttttggaggtagggtcttgctctgtcaccaaggctggagtgcagtggcgtgatcacagctcactgcagcctcaacctcccaggctcaagctcctcagcctctcaggtaacttggactacaggcattcaccaccatatccagctacttcttctattttatgtagagatgggatctccctgtgttgcccaggctggtctcaaactcccacattccacttttatgttaggaagactgctttttcctttgtgtctcatgagctaaacctctatagcttccagcttttcttctgcagttttcttactctcttagccttcgcagaattgaagttagttacagccttgcgctggattaggttttggcttgaaggagtgatgtggctggtttgatctattcagaccactaaaactttcttcatatcagcaataaagctctttcactttcttatcattcatgtgttcactgaagtagcacttttaatttcatgcaagaacttctcttttgcattcacaacttggctaactgttttgcacaagaggtctagttttctgcttgtctgggctgtcagcatggcttcttcataggcttcatcattgctagcttttgatttaaaatgagagagatgtgattcttcctttcatttgaacacttagaggctattgtagacctaatttcagtattgttgcgtcgcagggaacaggaaggcccaaggagaaggggagagagtagaaggtggccagtcagtggagcagtcacacaacatgtatcgagagtttgccatcttctatgggtgtggttcatggtgccccaaaacaattaagattctaacatcaacaatcactgatcagagagatcgctggtggtggtggtggtggtggtggtggtggtggtggttgttgttgtttgagacggagtctctatcgcccaggctggagtgcagtggcgccatctcagctcactgcaagctccgcctgccgggttcacaccatgctcctgcctcagcctcccgagtagctgggaccacaggcgcccatcaccacgctgggctaattttttgtatttttagtagagatggggttttactgtgttagccaggatggtctcaatctcctgacctcgtgatccgcccacctcggcctcccaaagtgctaggattacaggtgtgagccaccgcgcctggccagagatcactgttcacagatctcatactaatgaaaaagtttgaattagtgcagtaattaccaaaatgagacacagagacataaagtgagcatgtactgctggaaaatggtgctgatggactttcttgacacctgattgtcacatatcttcaatttgaaaaacaaaaaaatgcaatatctaagaagcaccgtaaaacaaagggcaataaaacacggcatgcctgtaaatggcagtaaatcagaaagtaaggtcatcatgaggttcctatatcatgtgtgcattctgatttgataattctgattccatctcattttttacaaatgggtttgaactagatctccatttgtgttcaattttctgccttaattatgtgcccatacagatttaaactaaacacagatcttctgtggtcacaaattattgacctctgttatgttttcaaagcctgccaaatactttaagtaagcaaatctatccatggaaaattctataagggctaccctttggctcctaagagatagtttttggaatttttttatggttcagatatttttgtagctgattcaacaaaatgaactttttaatttcataaacattcttctcattgacaaggcagatgtgactaaaagagatgagaaataataagaacaaaacttgttactgatacatatagttgaattacacccaaaaatagttcaacagttattaaaaactgcttttttgagaacttttagctcttctccaacttgtaatcatgagaaaataagtgagtagtaacaggaccataatgtttttacaaatccagacacctttatgaaacatttaaactatccagaacgtaaaaaggagaagaaacaaaggctgttgaacagtaggagggctatataaacacctccaggacctctgtaataacctttctattgctctgagttctgccatacaaactcagcatgtgaacaaattattcatgcctcgggacatattaagttgttatggaagtttctggagaaggtccaccagctggtgtagagagctattttgcctgtcttaattgcatattccttagaatttctgtgatctgtaaaatcgcaggccagaatgaagcccccttttcttagcatactttctgtgtaatgaatttaaatatttgtgttagttttaaatgctgaaaggggaatgaaaaaaaattacaaaatgtacttatgccaacagttctcttatggttaactaaaagtatttttccccattccttaatttcaaatcctgtgagtttgggtaggggtcgagtgcttgtctctgttttccaaatgaagaattcctggcaagaagattaagtgactaagccggctgtgtacatggcagtgctgggcagcagcaacacagtagatgacactttcaagttatttttattatttggaccagatgcatctggttggcaccttgagccaatgagctgccctcccagaggtcctctggcacagaattggagttagtatgaacaccagagatataagataaagcatttcagagaacactgaagttaaattcagaagacctcattcacatctctgccaaatcacaactaccttaagtgagcttgtgaaaatgcgctttttgcctaccatacagaatgcttatcacagaagtgttattgcttagtactcaggctcaaattctggctctacaacctctgttctgtttcctcatatgtaaaatggaaatggcacctacattatgggttacatgcgaggctcttagcatgatttttggtgtgtaataagccctctattgataggaacagcagtagcaggtagactctatattgatatataatcagaggagttacaatatgtatataaataccgataatataaagtggaaagttatgcattcaattagcataatttaaagctctttggtaattacagaaaggagagattattttcttttgggttgtcatgggagtgttcctgaaagaggtggtttttgagcttggccttaaaggatgaagatttgggcatgccaaggcaggaggaattgaaagtggtgaaggacattccaagaagaagcagaagtgtgaacaaaattaaatgttttatcattgttattttattgatttttaagaaattatatttaattcaccttttggccatgtatgtatgtttatatgaacatagcctgctgttttaggttctgagaatccttacaatactgttttaaatcaagatatttttgatttctgcagaaaaccagtaaggttttcttatttccattttatagataaggaaacagacttcacactagtgattggtagaatgggagaaccccagtgtataagcactaaatttcatgtgtttccacagcactgcactgcctctgttagactttaagtagaaataatttacacaccgtccaccatattccccaaagttgctttcttaaaatgtgtggcatatttagaaaagttggagaaagtctcggtgacctcatatagatgtaaccccaaacccacaaataactagtcatagtacttaaaaggcagccacaaatcatgtgttttattaacaccatgtgtggtgctccatcttgccaccgttagccaagctcttgcctcaagtttgctaggtaacttatctttgtctttagtttattaaattaaaactgaccaataaatgagtatcaggtcttagagctgttcagcagtgtggtagaggaatcctattcttgactcttgactcatacatatttgaaaaaaaaataaggatttttatttattcatattaggaaattatgttaataaattcataatagtcaaatcatttaaatagatacctacttctagaccattgttctcccagcaattttctatttaccattagtatgatttcctttatacaggttttttttaatgtagataaaatatcctgagttgcatttataatacattttagttgaagcaataagacacaaaagctcatgttttttcataaggtctctaagacagatatctccagtattagatgaacacagtgtatttcccaggattatgctattgcatacttgttacattttgaatatgaagttaacatattctgcttgaaatgtcttgattacattgcatgttctgaaaactcaaactattccaataaaactgttacttcaagagtaatatgactatatgatgtgacatttatattaaatgtgattttcatgtactgtatagggttttttgtataacaaactaatttcatccaattctggttgcattgtaaacttgggggtgagctaaagtgatttgtcataaatatcccactatggaatttattctgaatgaattgtagcatatttctcatttttaataatataaggttaatatcattcagtatgaaatatattttcaaaaatgcctccccaatgctgtcactattgtataaattttaacttgatgtctgcattgcctaacactttctgtactttatctgctgttcttaatattgctaagattcttataggaatatatgcctttgttgcccagtgtatagctagtatcaagaacacttgttaccattttggaaatgaagtagtattttcaagctaccaagacaattgaggagttttgaaatgttaataattctcattatgtggtaacggattttagaaattactgcatttactttaaaagcccagtgcatctctacttagtcctttattgatagtgttcatcagtcttcacaggtgtatgataatgtgtaatgaaaagtacagcttttcacatctttgctattcacgacgaaccctgaatcctcatgtttcttcaccccagcacagtcctttccctactcctctttgctaggcaccagtctaggcagacagagtaggtaagtgacattaggaacaggacaagattaagtgacacctgggtgctacaaggctgaagaaaggaccagaccaattctacgtcagatttcaatgtgaaaaaaaatacttttgatgccttcccgtctcatcttttgcatccctcattatctcttattctcctgatgatcctccacatctgatagaagagttacagttcttttacgtcagggggtaactgtaaccatcaggggctctggaaccccacttatcagcattgtggctttgggcaagttagttaaccactctgtgccttagtttccttgtctgtaaaattcgaatggtttgtaatggtgccccatcccaactggaatgtaaaatgcattaaacagtgcctaccatatagtagacactgtagaaatgttggcagcaatggtattatgacaataggttcatattacaaattagatggttaaggccttatgggtgagactttatatccacgctaaaaggagatcagtaaatgttgcatttactgaatgttgcattaatgaaaaacttgcctttacttgtaagtgccccttacttaaaattatctctttttcccccttaaaacattaattctttcagagtatactctagtaagggtgttaaaagaaaaaaaaagatgataactaaaccaaacaacaataaggtgggaatgattagtggctgcaccctaggaatgttttttatttaaatcatattaatttgcaaaattccaggcagcttggaattaggaagaggaatctgggccggtaacctgaatatccaggtcagtttaacttctcacgtcaaagaaaatactgctttactataagcaatgagaggtccaagattcagtttctaccatatattgactcctagtaactaggagtagtcataaccattaccccaggtcccacagaacatttagcctgtgggaccctctttgacttgagatgacctgacttcttgggttcccagatgctggaaatcttgcaaagagggcctcaaagtagcttcttgatctcattaagttgttctctcccctcaccattgtttctctaaaatgtttggctggctttttaaaaatagtacataaagtgtattatttctccttaattaccacacagtgtaatgtggtaaccattggatgccttatcaaatatgtttgagattgagcccatttaaaatttattccaatacagttctaaactccattcatgcctaaggattgtcatttactgtaatatagcatggtcctcagtcttccactcaaaggaattagaggaattaatgccagtcattttcattaaacccttttaatgttaaagatcataatgttcttaaatgttcaaaatatacagaacatatgaactgtgacattgggctccatttcaaaatagcatgtttgcatatccctgttgtggctgttttccacttctaatggtcataaaaccctggcttatatttagcagaaaatcaacgactttgacagaggagcttagcctggtaacagcgcaaattaataaccatctttaatagtagtgagaacagtctttgaaggggtaagccaaaacctgacccccgaaatcaacagtattgtcaaagtattttacggtagattggctgtttaatctactatttaaatgtacttactagttttatctaaggagacaaaaccagtaacttacctttataggaaatactttagttaaactgtagtgtaattgcagtgctccagattaactaccctcaagcagtaaactatattggttgcagtatagaaaggatgtctgcttagtatctgcataatatcaaccattgacataattttttagatttatttttaggaccttccaaatacaggatactattctaaaacctaataagaataggggagatatatatatataaagctatgctttaagagttcatttagaaactttattttactgtgctggaaaatactgtgtcaagttgtacttaaattcaaagacaaaataaattaactgtgaccttaaatcaaaatttaattatgtagtacctatttctttatcttaaaatgtgaagcaaatagttatgagggcacagttggtgtagtgagaaaatacttctctagttactgtaattatgggataattaaataacctttctgaacttcagtttcctcatctacaaaatgtgaacagttcttgtactgcttacttcttagtgtttgcattgggaatcaaatgagatgataatgtgagaaaatgcttctttaattactaagtgtttttcaaatgtctgtgaagtcctaaatacaaatcataaaattagcaatgtagaagactctaggctgcagctacacatgtgtatcttcgaagagtatttacccaacatcctttgaaaagcaaagaagtaacctgagctttcattgacacacaaattttcatcttaatttttgtgtcaaagagatgttgcttcatgtagctgataagctagcatttattgacttcttattgttattttagatattatttctgctaatcaacccttatttctacatgtcatatcatttaatcttcccaacaatcctttgaggtaggtaatgttagtagcttcattgagggaactgaagtagaattgcttaaaggattatctaaaaccacacagctaataagtggccaaatgaagactgaactcagagctgtgttattccaaagcccaggcagctctcctggcccccaaagtaggcaattggaatcacactaggtataatatagcttatcccatattaaagcaccccctcacccaaatcataacttctaaaagacctattgtcataaaatagttttaaaacttggtaccgtaacttttagccataaaagggaccaatagcctttgctaattaagagtactgacagattcattacctgacttgaatgcaagtgaatgactggcctctcagagaccaccagtggttacacagtggccaaattggaaattcattagccagaataagaagtactggaagaagcagctgctaacttctaccttctctttttgccacttccctgatcagatctacagaaccctgtatctctaaatcccactcatccttcagcttcccagcttgagcataactggcttttttccttaactaatgataagtatcaccacatgtttaaagaattaagccattttaattgaattcctacagaagccctgctgaacagtagatagcaaaggaaaagtgtatttgtttaactataactcagagttatatagtatgcctcacattctcacaaaaattattttttgactaagtttctagcctgagagcaatagtctgcatttatgggcctaggtacacattctttagagttgggtagcttcccctaataattaacacggttattgaggaatgctttttaaccattcttgtattaggatgccacctataaagatatcatccaaaatgtggcacattgtcaccagaagtatgcagaatgattactggtagtacaatataaacatttttaaaaattataattataaatgttaattttctgttaggaaaagtatacagccagcacaccaaagccatgacttcatgattttttaaagttgaggttaaactaggtattttatttttaaaaaagttaaaagaaatgtcaaatgaagaacccttcagttagtacctgaataggcaggtacacatataagtgagatgtggaaaacagtggcctgaaatacgcatgatgatctcagcactagttgtctacagtgcagcgtcctgtatgacagagtcttgatcatcctgcctttgtggcattctgtaatgaaaactttggattggctattacttttgttatagtgagcttattagggaatattttgtcccttgcagaatattttgtccagcttcaaaacagccttattccttcaaaataaggagtagtcccagagtctgttttgtttttgtttttgtttttgttttttgtttttgagacagagtctcactctatcgcccaggctggagtgcaacggtgcaatctcagttcactgcaacctccgcctcctgggttcaagcgattctcctgcctcagcctcctgagtagcttggactacaggcacccaccaccaccctcagctaattttttgtatttttagtagagacagggtttcaccatattggccaggctggtctcgaacccctgaccttgtgatccacccacctcagcctcccacagtgctgggattacaggcatgagccaccgcactcggcagtcccagagtcttatttccttatttttcttataatgacatattcattatttgccagctccttcacaatgggagaggctctgcagaatttactgtgatgagtttgcaaggtgaaagcaaaagaacaattatttttcttggtagtttaaatgagatcttgctatggaaaagtctgaggtaaaaccccaaagctgtttctcccccaaaaaagtaggtatttatttaggaagtaaagttggcaacaaggaatatgtaaacctctcttaaatatgacatgtatgtttcattaggatttcaaagtaactgtttatcaggtaatatacagtactacctgtgtttataacttctgactttgactgcatgagaaacctagacttgaaggttttcttgacttttgatcttttaagtgtgttttttactttgtggttgtgtttgaaaacaatttaacttgaatggctaagattcgtgctttgggaaagttttttgttgtttaatctgttggttttcattgaaaaactgctgctagaaacaatgtgaattttggaatccaactcgcttggtttagaatactgggtctcgacttctcactgctctatgactttgagcaaattggcgcctgactgagcctcagttacacaaactgaacatgggcctaacaatccttacttcatggggttgcaatcaagattaatgtaggatactataaaagggttcctgcagtgttggacagaataaatggatggtagctcttagttttgttttttttcagtctatagctgcactgtgatctatggttatgtaaccccaccatttatagcctcactatacttctaagtagctatattagtacgttctcacactgctataaagaactacctgagactgggtaatttataagaaaaagttttaattatgctcacagttttgtgagctgtacaggcttctgcttctggggaggcctcaggaaacttacaatcatggcagaaggtgaaggggaaggaggcacatcttcacatggcctgcaggagagagacagtgaagtgggaggtgctacaaactttcaaacaaccatatcttattagaactctatcacaaggacaggaagggggaagtctgcccccatgattcagtcatctcccaccaggtccctcctccaacactgaggattacaattaaacatgacatttgggtggggacacaaccaaaccatatcagtagccttctttccttgaacttgccctagagagcctccttattcttgctccacatggaccattcaggattttgctattcactgtgtatttttaagtcatttctcctgcccacctcctttcctgccagttctgcatcctatttccccctttatttcagtctttactgttgttttctctggactttcaattgttagcacacacttcagcagttgtttttctctacttccttgattcaaatcttatttctccaataaaatctatgtacacaagagcaaagaagactgtacctatacttttcccatattatctacaattgcttggcatagtgccagaaacaaaaaagatgttaaatcagatgcattgaaaaaatgggaaagcagtggtcttaaaataaaagcccaaaacattctgatacatttagtttaggtatagttatactatatcgagtacaatactaactacccagtaatggaaatgtaatggagaaaagaagaggaaatacactaaatcccttatgtgagacctagattcaaattctgtttctctacttgcatgacattaggcaagtcacctaacattaaatgtaaaattgcagggtgcaggagatggggagaacaaaccaaacaactaataagtacaacagacttggactctgaagattgaaatcttggctctggaactaaataactgcatgcatcttcttgaacaagtcatgcatctcttgatttccctcatctctaaatttagcgtgacaaaatccatctcacaaggctgttaggattaattagaacttgtgtgtgtcgatgcctggtatattgtgggcatatactaaatgttagatttatttatcaaaaaaactctgtggatcttatgtgacctcattgtagaaatgagggactttagttagccaatcactgaaatccccttgagctcttagttttgggcaggtataacaaagtaccatggactgagtggattgtaaacaatagaaagttacctctcacagttttggaggctggatgtacaagatcagggaactggcatggttgggttctggtgggttctctgttctgggttacagactaccaacttatcactggatcctctcatggcaaaaagagaataagaaagctctccaagtttcctttcatcatattgttgttaggatttaaacatatcaatttgtgggggacacaaacattctatccataacaagttccaacattctacatcagtcatctcagagagaagataatagataaagaatggatattgttctttttaagctcactagggattcctaacttatctacaggaaacagttgtaacaaatagagaaaaattgatgcctctaaattaaatatggtactagtaaaatatgtattattcatactatggctttaccttcatagtaataccagtggatatctatggcatcttcctcctgtgttttgatgtttcattttgcccagtaagaacctccctatattgcatgcttaaatgataaagtatctcagtaataaataaagcagagttgaacctgccaagttgaccgacagttcactggtagaagaagagctatattttataatgcatacatcaggtttgacttctccttaatattatacatgattaaacaagttcaaagagaatataacattgattcactgcatttctcagtgaaggattctgcctgttgaagagaagaatgtaatctattgccaattggggttttgtatttgaagtcctctgatttctaaaataagcacaaattgttttcttgtctttcatcttcacagcctttctatgcatagaaatcttgaatatggtctttttctggcaagtgtctgaataagggtttacaatgccttgtttatctgacaagcaaccatgttggcaaatatttcaaggctccagtaatactaatgtgagtctttaggtaaaggaagctggttatctgtctggcacatgggaagacttaagagcattgcagtaatgaactatttccttagaatgccaggtttaccagcaatcagatatggaggccgcaattaatacattaggatccaccaggaggtcctaaaattgggtcttgtagagtttcaaaagagatactgttactgtgcccctccttttcccactctgttggccaaagttctgagtatggcacttccctccttgcttccttgagatctcagcatttagtgaagtgaaaagttctctgctcacaagaaagatcctccccccaatccggggtttgacagacaggtctatatggtgtgattccatggatatgtggtatataatatgccagaatgtttgacctaccaggtaggaatctaaccatatcttcctccacaagcactaacatttaggattttggtttttgtttttcctcaagttgttattttgaacatcttatttgtaagttctctgagggaaattgaaatttaaaatatctaagacaaagaggaaaaatctaattgagttgatcatttctgagattactttaagtctttgtaaacttagtttaaattttcacatttgttccaagtaaatacttagaaaacttaagaactgcatttgatgccacagttgatcttctggcagcagatagtaaatgggagaaaagtaaagccagtaaaaacggttcttaatagaaatgtaaaggaatttaataagtatatattctgttcttaagcctttgaaaaccatgagagattacttttataaaaatatatatatttttttttgcgtgaactccacttcttggagctcaagttcttggcccaaattgtctctgcaaatctgtattatgaaagtctattcttaggtatggtttttaaaggatgacccctggacagttatgttccgacacttttaaccatgtaaccctttcttcacacaaaaatatttcattgaagtacaatatctacagtgagccccctctgtttgaagtggggtaaagaaagaaaaacagaagtccacatatacacacagacatgcaacatgtatgcataaatctgtggtttcaaaggtcacagtttgaaaatcctgagtattttactatgttttcattagaaggacagccccagtttttcaaattctgaactagaccttgagcaataattattttaaatttaaaagtacaaactacaggaagaagattcctgaaagatggtagcagtagtgacattgttctttaatctcatcataaaacagagcaagtaggatatcaaaaccaaaaacctacagatagcaacaacctcaaagctaagtatccttataaacccccaaatactagcaggtaaggacaaactgccaacaactacaaaatcagtgtgggatcagtaaatgtgtggaaggaagcaaatgtaaggaaacaaggtggttgatgggtcctgagaagaggaaagcccttgaagtgccagcaaatactcattggaaagcacagcaagccaattacatagcaaccactgagattgcttgggcgtttttgtaatgtttaattcataggtgaataaaggagactggaaagtgattcagtttgatagtgctaaagcagtctgggccttaaaaactcctgaagcagacaaaccaaagttgtcttccagaacaaatgctgtcactgaaggaagctacttgaagtagaatccaaattaagcagtacaggacaaaaggggagaagaaacaaagtccatataaaaagtgggcaaggacaacagagtaggcagtcccacaaagtgggagaccacattttgtaaaatcactttgtgaaaacaattgaaaagacagctttggaatcattaagttgggaagaactaggctggactgtccctttcacagtacaggaaaacatctttaaaaaaaaaaaaaggaaaacaaaaatggttaaagcctttataagataaaagaatacagggcaaaataacgttcctacaatgaaaacatgccccaaaaaatccacaaaatagattaaaactatgaactattacttcaaaacaagctaaaagaagttttttacatgatatccgaaaggaaagacaaatccaaattagaaaagactcagaaattaggtgattgagtaaaaatcaatggagtatataagatattttagaaaggaaaacatgagccacttactttctgtccagccagacttaccttcagttacagctcccccagacaatcaaatattgctcacatgagcccttgctgagaaatctactggaaaatgagtttcagacaaccaaaatgaaaaacaaattgtagagacatcagaataaggactggtgaaattttgtttcttagcacttagatacaggaccatgtgactgagtcctggccaccgacaaggggtagcagaaatacaaggtacttccaagcaccatcctccatacttttttcactgatttgtcagctaggtacaaaggatccagcaaagtattctttgtcaccaatagaaataacttcacagttattccagatatctttaaataatgcttcatcacctcattacaatttttagacctagcagattaaattggattttgtcatttattattaaatctgtaacactttttttttttttttgagacaggattgctctgtcacccaggctggagtgcagtgccgtgatcacagctcactgcagcctcaacctcctggactcaatcctcccacctcagcctcctgagtagctgggaccacaggcgcacatgctaccaagcccagctaatttttttattgttactttttgtagagacagggttttgctgtattgcctatgctggtctcaaactcctgggctcaagcgatcctctcaccttggcctcccagactgctggaattacaggcatgagccactgtgtctggccctgtaacacaaaagtttttaatcctttgataactttatttcaatataatctattttctttgtgatactgtgcattttctgttatgatttaaaaatattatcctgagaaaaggtccatatgcttcactagactaccagatgggtccatggcacctgatttaaatggaagaagacagggtctttaaattaaatgggagcagagtgcctttcccccactctatcaatacacattgaaaatgacttgagccagaaatagtttttgtcatgtttaaatgggaaaaaaaagcacaaaggaaagttttttattttattcaaatgcttttttagaaagaacattaatattttcttaatgttttagtagtttttcattattcaaaatcagtttacatggtctttactgattatccccaggggtcaaaaaaagcaccaatctacctttaatttttgtggttgggaaagctagaccaaagtgaaaaaaatttttttgtagtatttccataggtttttggggaacaggtggtatttggttacatgagtaagttctttagtggtgatttgtgagactgtggtgcacccatcacttgagcagtatacactgaagccaatttgtagtctcttatctctcacccccttcccaccctttccccactgagtccccgaagtccactgtgtcattctcatgcctttgcatcctcatagcttatctctcacttaagagtgagaacatacgatgtttggttttccattcctgagttacttcacttagaataatatgccattaattaattcctttttatggctaagtagtattctatcatatatgtgtaccacagtttctttatccacgcattgattgtggacatttgggttggttccacatttttgcaattccaaattgtgcagctataaacatgcatgtacaagtacctttttcatataatgacttcttttcctctgggtaaatacccagtagcgggattgctggatcaaatggtagttctatttttagttctttaaggaacctccacacatttccatactggttgtaccagtttacattcccaccagcagtgtagaagtattcccttttcaccgcatctatgccaacatatatatatttttttatttttttgcgggagtaagatggtatcgcattgtggttttgatttgcatttccctgatcattagtgatgttgagcattttttcatatgtttgttggccatttttatatcttcttttgagaattgtctattcatgtccttagcccactttttgatgggattgttgtttttctcctgttaattgtttaagtaccttgtagattctggatattagtcctttgtcagatgtatagattttgaagatttttcccactctgtgggttatctgtttactgactgaagtgaagatttatttcttacagtcattctagtcctcattttaaaatgcaaatttggtacaaagtactcttttctgaagggaacgtgcagatttcagacacaaatacacgttattgtacatttctaataatctatcacaaaaaaatcatagaattataatgtataattttggaatttattgttgaagggggctttggtgatatctaatccaccttcctcatcttcataaattaaggatctgaaaagtttaaatttatatatggtcacatttaccctggtcacacaactggaatggcagtctagaataaaactatgctgtttccacttatgtggtaataatgcgttagaccaattacagtcttacacagtcttcatcttcctcccctttcctccttccttcctgtcacagcagaaaaggtgtcagtgcttctgtctgtggtttaatcctccttcctgtttggacattttgtatgccccgcccttcttatcccccattcacattcctctctagcttttcacatccagacttctagaaacagaaacacattgtctctcctttaatttttttatttcttaacccacaaccgatgacaagcatttcactcaaattgctcctctcaaagtcaccaactgcattttgctgaaagtgatagaactttctccatgttttccttcaccactctgcaatacacaacactgttgaccacattcttctcctcgaagtgctccttctctcagcttctgtgataccatatgcccctgagtttcctcttgtctggttgctctttctcaccctcctcatctgttgccaatacctttaaatgtcagtaagtgtttctcagaactccctcctaactcccctccttttgcagtgctggttctgtcataacctaatccactcataggggttataaagaccaacagttgtgagcactgttgactcacaaatctctgcaatacagccctttttacctgaatttcatacctggctggcatctgcagatggacatgctacaagtcctccaaactcaatatgatccttttgtgtctcaactctgagatgtattacttctttccatgctcctgtcattaccaccatcatcttatacctcagtcactataaagccctgtaactggtctcatgtcctcaatctcagctatatcctcactgctatcagggtgatctttttcatatgaaaatctgttgttccatgaaagggtcatatatgcaaagtgactcctaaactcagaaggagccaagaaacctaaggataaggctcgcaaatccagtttttcaggaaatggtaatttatttgggaacttacagatggaagcatactcttgggtggcagcaagacaggtagatctgcacaccactactgcccagaccggggcttttataccacagggaaagggtttacaggctctatagaaacaatttaagacaacccaccagaacaggcaagaatgctaggtacatcatgcctgtgcagtaatttgtgctgtaccatcaagattgctttgatctaaaagcaggatttacagtgagtacatgttcttacactaaagacagctagtaaaataagaatcaggaggccttcacaggactggagttaatcagaagtcagcattgtggattagtattcaagatggagtcacttttgtctaagcatctgtccatgttcacttatcttttcaaaacctctcctcttccttccctttccatattgtgttctgcattgtctaagtgacccaccaagcaaattttttgtaaagtggattttcgttcccttacctaacttactttcctcaatattgggttgcctttctatctaccaaacagtaggattcatacctgtctctgagtgtttgtggccattgtttttgaaacttaagaaatagaattggtgttttgaaaacttggatattgtcgtaacactgatagtgattctgtgggcataggacattgaatgtaattattatgctagataccctaagacttatgaaattggcactaaagcaccattaagagatactgacccacagtttaaatttactcaggccaggtgcagtggttcatgcctgtgatctcagcactttgggagaccaagggaggaggcttgcttgaggccaggagtttgagaccagcctaggcaacatagtgagaccctgtttctacaaaacatttaaaaattaatggggtctggtggcatgtgcctgcggtcccagctattcaagaggctgaggtgggatgattgagcccagatcaaggctgcagtgagctgtgatcatgcccttacactccagcctggacaacagagcaagaccctgtctcaaaaaagaaaaataaattttaaaaaattaatttactcaatctaaatggtttgatttttaattttaccatgtttggtgtttaataaactattctttgttatttccattctttctgttataaaagctgtcacgagttactgcttccaatatcatacataaaacaggactaatcaaattggattgtgccaacattttaactgaggagtcccagagtatttccatttgtagtgttgatttaattctagaagtttgtgttaagttccttattgtttcttttgttgaaaatattctctatctttattttaacattatttgatgaactaaagagatgtaattattaacaaaattatcattttaaaattttacattgtgaatacttagcatgctgtggtcataaacagtgtaattgtgtttgcagtgaataaattgttagcctaaaatagaaagaagtcttacatgaattaggacaaaatttatcttgatgttttgcaaatccttagccagctgtgaatatacaactaaataatactacacttcacagagaaagcaatttatcatgtgtgaatacatttttaggagcttttgtatgattagttttgaaatagaaaaatgcaacttgtgtaagtagagaaatttcacaaagtaatagctaaatgtgtaccacatttagctgtgttttagggaggttgtttttaaaaataatttggagtcactaccttaagccttgttttattatttaccattatttctcacaatcagtatattacatgtatacttgtttatttgcttactgttatcttcccttcgctaggatataagttccatgaaatgaagaactttggacttgtccactgccaaatctgcagcacatagaacagtgccaacatatagagggatcttaggatatatttgttgaatatatgaataagtgaacaagtaaattttatttagcatcttttttactttttacttatcatgttttgaggatttctccgtgttactgaagagtaaaatacctttttaaggaagaaatcatggtgtacctactgatgtactttggcagtgtccccactcaaatctcatctcaaattgtaaccgccataatcgacacatgtcatgggaggaacccagtgggaggtgattggatcatgggggcagtttccctcatgctgttcttttgacagtgagttctcacaagatctaatggttttataaggcgcttttccccctttgctcctcacccttctctctcctgtcactctgtgaggaaggaggtgtttgcttccacttctgccatgattgtcagttgaggcctccccaggcatgtggaactgtgagtcaattaaacctctcctccataaattacccaatcttggatatttctttatatcagtgtgaaaacaaactaatacacctattccgtcctcagcactttttgtcaatgttacaagtgtcagttctttatgaattcataaatccaataaaaagtgttgttctagtatttattatgtggcagacatcatcacagctgcctagtatgcaaagataagtaagacacagtgcctgccctcaggggactcctagactgtaaaagacaggcaacaacataaccaggggtaaggataatttattttgctggttaggagtgaaaccaggttttacaaagtggctaactctgagaaaatggcaacagactgatcaccaaaggaaatttaaacaaatatatgacaattagagagtgatagaagaggatagtgatattcaaaagaaataagactaagtacaaatagaacacacagatttccaggtcccatcagggaacaagttcaatataagtcagtagttttcatacatcaagaactgatgtgaaacaaaaatattaagaatagagcctccaaaaccaaaaaagtaatatttttcttcccgtagaagagaagctggtctttactaaagtagcaaattcaaatctagtctttactaaaatagcaaattcaaatctgttctcatttgatcatccttttacctattatgtgcagagagtcatcttaaagttagattacaaaaaattaagaggtgagtcatgatggctcttgcctataatcccaacactttgagtggctgaggcagaatgatcacttgagcccaggagatcagaaccagcctgggcaaaatagggaaagcccatctgtacaaatatatatatatatatattttttttttaattagctgagcatggtggcacatgcctgtggttccagctactcaagaggttgaggtgggaggattgcttgagcccaggagatggaggctgcagtgagctgcgatcataccacaggatcctttgtaatagtgtcacaggatccttcaggtgttgcttttctagccagaaacttctgtggtaggtggtgcctttgcttgggttttgcttgggcccactgggctcattccacccacttggcctggaatcagctgtgcttgactcatgctaccagcctggatcccacatctgccaagggtgagccaggcacggagcagtgagaggtgtgtgagcaaacaatcatggaatctagtcactgtgcatagccaggcatgccagctgctgtggtggggcaggcagctccatgcaagactgtggctagatcagacgtaccacaagtgacttctgctacaggcacctgcatctgaacaatgcatctgaacgcagtggcaaccagaaacttggagaccccaggaacagcagagcctcaaaaaggatgtcaacagtcctagctcagggagcccctaggcctgggctccccagagggccgtagctcttctctctttctcttcacccacaagatggtgagttggggggtagggggggtatgtttcagcactgtttgtattacagctctttcagtctcaccatttggtgggtcccaagttcttgttccacatccaggaagaatgagattcggacaactggagggtgagcaaggtggaaaggagcttcactgagtgacagaatggctctcaggagacctgaaatgtgtagctcctttttgcaggcagcttgtcccaatgaatgtccagctctcagcagagaggagacctgtagtggctagctcctttctgcaagcaggtcatctagaggagtgtgtaagtctggctgagtctggggtttttatgtgctcagaatggaggcagtacatgctgactggtccatgggctgtcacgggtgggcctggagaaagcaccatctggttggccaggtggtcatcaatgaagttctcactccaggctgcagactttgctcagaactggcagcccagcccacaggcttcaggccatccccagcctgaaggtggagtttcactggggacctgccccttcccgcctaggaacctatctgcttttcataccatccatggcacccaggctgtctgtgccaagaggcgcccacaggtccatgccaagctgcccgcagtgcccccggcctccctcctgcactcgtaggtgtctaaagtctggaaggagcctgtgcagcagggggctggtgtgtcagtgctgccctgagcatgttcatacccagctgggttgtgatagcacccaggcccacccacaactttgctccacctcagagtggatgcccagagctgggagaggccagggagtgggaacaggtactttgaagcctatgggggcagggagcttcctaggcccccaagagtgcagggatgccttggtctggagccatggctgggtggctgcagctgtgcctagcagcacagggctcctgccccgccagcttagtagagggtggggctcccgcctgatcccagccccgaccggttccatggagggtgcagccctcgctgcgcctcccccactacagctggcatccgtacagcagctgctgcagagaggccactgccgccatgaacagagcaagaccttgtctcaggaaaaaaaaaaaaaaaagaagaggattcagagatccaagaaaggcataaaggtggaaaataaaagccattttaaatgctgtaaaattgcttagtacagaaaaaggatttctaccttcctaactttccagtaactgaagggcattgacaaaatggttttttgaacagaaatagaggaaagggccttatatgtagcaaaataaaaatgaaactaagcattagagaaacctttctagtgtaagaaatattaaccaaatacttgaaagtcagtaattggcgaaactgccttctttgatttagggggacatcctgcattttgttggcggtctagaaacaaagatttattgtttccaatgatttggataaatagggtattctttgattcaaaattattagatacaacattttagcaaatatatgaagtatcaatggcttttgtaatcttaacatataaataatgagagttagatttggatttgggttttgatcttcccaaaggaaaattaaattcatcaaagcaaagaagcccagctggcataagcacttgacagattcaaaaaagataggactgttggttgtctataatatattctattctcaaccttttgtttcagctttaacatttctatcctttcaaatgctactctatcccgtccacctgcatcaaatgagtaatagcgttttacaagtagtagcaatttttctgaatgtaagacaatgagtggccatctttagaaggaaattgctttttaagaatcaggctatcgtttctcatttgaactaattagttggtgccttcagagctttgctttcatatactatgtatatcgtagttgtactacgtcctttgcatttgtttccatctataaagagtacaattagcctttttaatgcttagttcagtcacaattaaagctcccctaatggttagggattggtctttccaaggctgagaaggtgtttttaattattcattcctctgtttgtgtcttacagcagcctcagctgtgctttattattcaaaggttaatgcaaactgagaagtggataaattaaatctgcctggcagccaacaacccaacatgttagcagacactgtaagatggggatgggcagtgtaagttatttccattattgcagcactgccaaaagcaaaaaccactaaatccttcaaagatagccgacgttgacaggaattattaagggatactacaagttgatggttcttaaatagcagatcttctgtaaaatctgtgtttgttttgcttacaaagagaaggtagtggcagaaatctgagaggcaataatagctactgtagaaaattgatgtagataccatgactagtgaactctgtatagtattaaatcaccaactcgagtgctagaagtcacttctataaatgttttacaacagccaactgcaaaatctcacatgaaagctagggcataatagaccatccttagacaactaagcaattgagtagtgaactgtgacataatgtgaaagtgctgtcataacttcactcttttgagcaacaagatgtttctagagcctttcatttgcttccttttgaaaatgtgtatttatagaactcagaattttatagactcttaagagggtgccctctagaaatactgaccacaaatgatgtggaaggaaaataactcattttatcaagggaagtagagtttatgaatataccaaaagccaaaaagtaaacttgcgtcttctgtttggttgcttatcatctctttccaccaggatattctgtgtggctcatctcttaaaaacttgtttccagctggggctacacctccaccaagagccttcagagctcaattaattaccttccatcacttttctgtggaacagaaaaggaagataaacctatgtcatgctgcccacgctgttcttgactccctttgaccgaaaacccatctgtcttcctaacctttgctgatggactaaaggaaagaaggaaggataggtgatgaaatctgaaatctgtgcctgtcattgacagcctggattattattatttttttttaacacaaagcctaattctttcatgaaagccactgcaaagttttaggaaatccaggtttatgagattaaatagggatttaaggaggaaaaaagtaagtagagcaacctgatttgagaataataatcctatctcacttagttgtcactaaggttaaagaagatgatgaatgtgaaaatgttttgtcaacttgataagcctatccagagattaaatattgttaaataaattgccaaataactaactgaatgttattatataaatattgttagtttaattgctaagtgtttaggagatattaggacatacctataatttcttcagactataataactctaatctgtacttttattggcacttgtttgtaattctagtcaattctggtctcttaaacagaaaggtagtgaactaatgttgacaccatttagtttatcattgctgctatggtcttctgtatctcctgctttcagtccacactaagccttgctgtcagagtgttgcatggaaaagaagatgagcttttcagtgctcgtctaggtttgaaatacagtttcatcatttactgtgtaaccattgccaagccactgaatttctttgacctttagttttagataacatttaagtttgcagagtgacagtaatttgaaaaatatatgtgaatgataatacttagatttttaaagaacctactctttgccagacactacatttgacactgcatgtatgtaaatataaaatgtcttaattcttattataacttcacacggtaaaaagtgttaccttttttacagataagagaactgaggctcagtggtatgaaaggtgtctggcttaatgtctggcacacagaagatgctcagtaaatggtgaatattcttatgtggattttattatgtgtttcctatttagaaatttccactagtgcctatcaaacttttaatgtacacaccaatcatccaaggaccttgtcaaaaatgtagtttctcattcagtaagtttgcccagtgctgcttcttactggaccacactttgaggccctcagtgactccatagtctgtaatagtagttctatcatggtgattctagttgttcattagattctgattcatctggtctgatttgggatctaggcctttttgttgttggggcagggtgggagttccagaagctgttcaagctctttttaaagcagtggactccttttattcaaagagtatttaaagaaattatgtactgacaaggtacacaaacacagcggagtttgtcttgttgaatctcagctggggagggagcagcgaacttaatgaccccaaaagacctcagtggagccctgcagctcctaggagcaacaaatttgaatatcacggttctccagagtacttttgcaattctttattacgtcatttaaggccctacactatctaacctcagccatcctggtatatctgctgttcttccaaagggcaacccgctttcttctccctgcctttttccatgaagtgcctttagcctgttatgctttatctccctataccagttaaaatccacttcacctttccagcccagcttaattgcttaattgccaccccttttatgaagcctttccctggaggagatgtagttcatgtcagaacctcctgtgggacttgttcaaaccatatacttatcctgagagaacctaatgtttctttttctcaggtcggtgctgaaatgaaacatggtactactgtggtataagacagggtgaagaagctcacctaccaggaaatgaaaacttttttttttacagggttcccatagcatcttgattatgaatcctgtggaacaaatacgtcttaccttctctcttgttgcccagacaggaagccctttgggaatcaagaatgttctttatcttgcctagatcacagtacagtgatgagcactgatgcaagatgtgtattactccattttcgtactgctgtgaagaaatacccaagactgggtaatttataaagaaaagaggtataatgaactcacagcttcacatggctgggaaggcctcacaatcatggcgcgaggtgaagggggagcaaaggcaggtcttacatggtggcaggcaagagagcttatgcaggggaactgccctttataaaaccatcagatctcgtgaggcttattcactgtcaggagaacagaatgggaaagacccacccccatgattcaattaccttccactgggtccctccatgacacatggggattatgggagctacagttgaagaagaaatttgggtgggaacacagtcaagccatatcagtgggtaactactgaaaataagtctcaacaccatatagctagtattttagtcctgtgggagtcttgatttcctgaagtaatcatagaaaagtttttaagtgagtccacttaacactacctttttttttttttttttttttgagatggagtctcgttctgtgacccaagctggagtgcagtggcacgatcttggctcactgcaacctccacctccagggttcaaacctcccaagtaatctcagcctcccaagtagctgggagtacaggtgcctataaccacacccagctaatttttgtatttttaatagagacaaggtttcactgtgttggccaggctggtctcgaactcctaacgtcaagtgatccacccacctcggtcctcccaaagtgttgggattacaggcatgagcctccacgcctggcctcaacactacctcttgttggcaatcaatcaatatcttttattgttggattattatttacagagcctattttagccatctagcacttttcttcttgaacaggtctgacatttagcctttcttcccctattaaaacaaaaacaaaaacaaacaaaaaaaaaacctctcttgtttttgttgaagtagtaatgtgtgtatatcatggaggtgagaggattaattgtaaagccactgtttcagagtatgtgggaactttggcctggcgctgccttcagatgttataggatggatgatgcaaaactgaaggtattcttcactgaattataaaccaagaatggtgggacttatcaggtcatttgtgcatttctttcatgatctcagaatttaatggggagaagtatgggggacagagagagacattagcatgcaagatgtcatacagctggtatagaaaatggaaattagagcctttaaagagaaactcttactgtttccatggtataagtgcagaggtcaaggaggaggtgagccctactagtttcttgctttgcctggtaacaacagtagtgtcatgggatccttcaggtgtcgcttcaccagctggaaacgtctatgaccagcagcgcctctgcttgagttttgctcatgcctgctggatttgttccacccactcggcccagcaggctgcactcagcttgcactactggcctggatcccacacctgccaagggtgagccaggcacaaagtggcgaggggtgtgtgagtgagcaatcatgaggtctgcccactgtgcacagccaggtacactggcttcagtggcagggaaggcagctacaggtgccagctccgtgcaaggctgtagctgtaccagatacaccacaagaggcttccactgcaggcacccacatccagacaaggggaatgcagtggcacctgaaagctcagagatgccaggaacttcagagccccatagaaggtattacagtgtgtcacagctctggcttaggaagccctgagatctgggttcccaggaaggctgcagctcttctttctctttgcccacagcatggcaaatggaggaaagcatgttttctcggggtcatgtttcagctagtttgtgctgcagctctttcagtcccaccgtcctgctccggcccatggctcctgagctgacctgaccccaccactgcaggtttcaagttcttgtcccacgtctgggaagaatgaagttatgcagacaactggagggtgagcaagacagagagaagctttattgagtgacagaacagctctcaggagactcaaagtggtaactcctttcagcaggcaggttgtaccaatgagtatctgagtctggctgagtctggggtttttatttgctcagaatggaggaagtaggtgctgactggtccatggtcgggcctggaaaaagcaccattcgactggctaaaaggcgtcaatgaagttctcactctaagttgcagactccaccttggattggcagcccagtccccagacttcaggctgttcctggcttgaaggtgggatttcactggggtcccaccacctcccacataggcacctgtctgcctcccaccaccatcaacatgctatctgtggtgcccaggctgtctatgctgaggggtgcctgcaggcccatgctgagcttccctcaatacccccggcctccctccctgagttcgtcagaacccaaagcttcagaggcggccaaggtggtgggggcagggggctggcatgacagcaccaccccaagtgtgtgcacacccagctcggtcgcagcagtgcccaggctcagctacagctttgctctgcactggagcaggtgctgggattgggaagaggccagggagtaggagcaggcacttccaagcctgcaggggcagggggctttccaggtcctgagagcacagggatatccgagtcagaaccactgctgggcagctgcagctgcgcctagaagtgcaggctcccaccctaccaactcggtagggtccggggctcccactgggatcacctgttccctgcccctgccagcttcacagagcatgcagccccagatgtgcctcccccactgtggccagtgtctccacagtggccaatccggttgcgctactaccgccatcaatagtataaacttacatagccattactatgagccaggcactgttctaggcaccttacatatattaattcatttgatgctcacatcaactttctggagtagctactttttcagagatggacaactgtaacattaagaagttaagtaacttgctctgagttacaaggtaagtgggactgccaggatttggacgcttcatctctggatctgaagcatactttctttaccaccatgttacggtaatagattcatgttttacaaaagatatttctttattattcttcaacaagcatttattaagtgtctctgtgtgcaggtcacttttgctgttagtcttctggttgaattgtcttccacttcctctgctttgataacgttggcttccagacagcgtggtagaagagacagtgttgatgggtcttggagctagatgattgtgtaaggaatatttaaaaaaaaaaaaatgcaggtagtaggatgtcacaaccaacctttttaggaataaactagacaactgtatgaagaaattgtttattattttcatagccaagaaacaaaagatgttctcagccaaagagaagtatattgagtgtcttgtagatatttaacctaccttggaaacaacttgtcttgataataactctttatacagattacatttcttttttttttttttttaattagactttaagttctgggatacgtgtgcagaacgtgcagttttttgttacataggtataccagtgccatggtggtttgctgcacccatcaacctgtcacctacattaggtatttctccaaatgttattcctccgctaagccccctaccgccccgccgacaggccccgatgtgtgatgttcccctccctgtgtccatgtgttctcatcgttcaactcccacttatgagtgagaacacaaattacacagcttaactagtctgtctaagatagttaactgtccctcagatctgccccatcttaacttctaaatggaatttttactgtgattacttttgtaaatattagaaagtaataattatgcaattagaatgataccgggaagctttacatttcaccgtgtatgagtggtaacatttttgagaattgaaaatttttgagaagcgatttggcttcctgaaaactgtgtaggggcagcaatggtttaccctcttgtcagaagcttgtttatactgcagataagatcggtagatacattaaaactccacagtttccctgcctaacaggtgggaggtgggggcggaattaatttaagaaatattctttgctacatttgctagctcataggcccaagtgttcttacagtacagataagagaggctatttctggaagccctgagtaccttgaggcctttcattacatatttgaaacatgcccaggatgaaaaggttgaaaaatatactcagatgctcatcttaatctctggtgtcctgtcaagcagggtagtttatcataatggttacctttctggtttttttacttcagtcttcgtatctaattggcagatgtagtgacaggataagagtcttcactttagaattagagcagtggtcccccacctttttggcactagggaccagtttcatagaagacagtttttcaacagacggcatgggtcggggagatggttttgggatgattcaagcacgttacatttattatacactttatttatattattacattgtaatatataatgaaataattatataactcaccatcatgtagaatcagtgggagccctgagcttgtttttctgcatctaggtggtcccatctgtgggtgatgggagacagtgtcaggtcattaggtactagattctcataaggaatacacagcctagatccttcacatgtgcacttcacagtagggtttgcattcctgtgagaatctattgccaccgctgatgtgacagaagaggacattagcatgcaagatgtcatacagctggtatagaaaagggaaattagagcccgtaaagtgaaactcttactgtttccatggtataagtgcagaggtcaaggaagaggtgagccctgctagtttcttgctttgcctggtaacaacaatagtttcatgggataatgcgagtaatgcgaacaatggggagagcctgtaaatacacatgaagctttgctcactcacctgctgtgtggcctccttcctaacaggccacggactggtactgggagtgggggacccctggattagagggttcaggttttcttctctgggtgtgaccttgagcaaagcacttcacttttctgacccttaatattatcgcctttgaaatgaaggccttcaatggaagtgttcagcggggaaggagccttttcatttttcctaagtattcctttctttccccttccccccatatgcatgctgagaatcactgctgaagtgagtcatttttactgcaaggaaaggaaggtatagtggaaaagggaaaaaaatgttgagaaccacacagctcatttctggagtcctttcagctaattaaaggattgcagatattataattcagtattttaattctgattgattttatgcctaattgtccaagtgaatggatttctagtccagttctaatgcttgcttgcttctgtgttataaaaaaattgaactctagatggtttccaaagtctttataatcataacctatttctaacaacctatgtatatacatgttgaacatctgaaatttgaaaattttaaatctgaaaaacttctggtcccaagcatttcagataagagatacttaacctgtaaaaagtaagacttagttcttgttgattccgtggttggtctttatgtttacaagtaaatgcatattataaaaatgtagcttaaaaagaaaaggaagaatatacagtttttccctgtagtctttcttcctgcttcccagtttctctgcttatccctgctcactactttatacagttatgtctcttaaaattttaagtctgttggcatagttgtgtactcattgcaaggtatccacacattgggaaaattaaatatacacgcacgtaacacaaaaagaggcagggaagtcaaggagtgtcatgaacttactgaggaagtcttcctttctcagtgactcatagaaggctcgtttactctctaagcttgctggctactgctttccctgggaaaaggaagtattatgatgattaagtagtagttattttttcatttaaaatattctttttcttctatttcttactctctgctaagttgttgacagtgataacaaagggtacagagtaggtaacaatagtgactttaaaatgatatttggtgaaagatagccaaaatcatttttttcatctttacatctcaaatctgtaaagtgtgattgagggtaaatatcattcccatttattaagcattcactgacaaaaaagtacaaaataattatttttcttggaatatttcaggagaattagaaccagatgtttaaggactaggaagaagccttatgggggataaaattaacagtccatttctgcatggagtttagtgtatgaaatgggtcttttctatcagcgctattatatcctaacttcctaagatgttttggtagactttggcagtattggttttttaaaaaaaaattaatgaatacaaatacagggaatctcaggagtctatggaatactagtcttcatttgtcctcctctcagacactacagtactggcctgtttctgaacaccctctggggcatagggaatgccttttcactgtcagtatagagttctttttttcctttgatccagttaatgctgtttcttaatatgtcttcttcccccaaaattagaggcctatgtctatgtttttataacgtttatatttgcacagaatgttaccacttccaaaggagaacctagtacagcctttaggggatcagaaaggttgcagccaagttaagaactaggggtcaaatagaatggtcagacctacagaacatcttatgcaaaagccaggagacaagaaagagcccagctctcttgaaagctctgcaagtaattccagtatgattggagtaatagagttgaaggggagctttgggatggcaagggatgggaccagaagtgtaagcaggagccaattctttatgaaagactttgtatgctgcaaaggactttgggcttgatcgtgaagaacctagagaaagcagggaagcaaaagatcctacttaaaggagtttctggaaattgccctagctgcagtttggtaaacagattggagggaagcacaactggaggcagggaaaccatgcaagatgctggtgccataatctaaatgagagctgatgcggccaataatcagagtacagagataacaatgaagtaagattcaacaggatttgggggacttagagcagaggagaaaaaagaggcatggtcaaggatgactctcagatttatgaccagattagagatgctaacagtttggtaggtgattgtcaaaggtaggtaatgagatacccagaatgaaggtgaagagactaggtagctgagggtagaacccctaagtaggcagacattgaagaggacaaacaacatggagtagaaccctaaattagagggagactgtcactagagaaacaccttcattattgtgttgtatgccagaagctcaatatccctgcagctagcttccaaagggactttggacataggtgcaatatatagtttgaatgtgaacaatgtactttcccacaggaaggatgaattcagttacatggactctgcttataagcaaggattgctaaagcttttgaaaaatcccctcatcttcttctcactaccctattccctggtaatttcaggtcagttccctggacttacagggactgaacacctattcttcagacaagatactccctacctgatcaatcacacacatactttaagagaatttcactgggttgtaggattagcagacagcaattctcacttgctgtgtagtatgattagattttttaaacacacagtttaggtatccattaccattaaaagtttattttcagctagctaattccatgaatactaattttaaaaagcccattcccctttgacttcttctagttatgccatcaattataatcccttcaatcaagatttagacttaacaatatacatagcttatgttttttcagcatttgatatgttcaagcaaggttctaagcactttttttgtaataataccattaaacctcccaataacctcccaacttctttgattcatgatgtagaaatatagtgtgagctatgtatgtaattttaaatatcctagtagccacattaaaaagaagaaaaaagaaataggtgaattttattttaatacatttttagcccaccatttcaacctgtaattattattaaataattattaaatagataaatagtaattattaaaattactaatgagatattttactctcttttgaggtactattatctcattttacttaagaagggattgaggcacagaaaggtttagtgaaaagtggtggcaagtcagacacattctttctgtggagccagaatcccaacattgccgaggcatccttcctctttacctgtcccaaagtcagtgttaagtgaaaaagcagtagacacagccaaaaactcttggtcttagaatcacaggtgtggcacagcagattgaaagtattcagtatatctaaagcatcttatgatctttaagatgctaagtaaagacagcgagagcctattttcatgatttttattgcatgtaatatttcagctgtacataggggctcatccactgtaggctgcagcatgggaagctgaacacagtttgattctgttgcagaatttctcctgaagcagcaaccttgggcattcagccaaatcgtaatttgctgatatttttcattctaaaagatttacctcattgtgtttttattttgaaatttaactatgaaagctttaggttttttttcttatttaaaaaataaaatctgaaaataaaacagtaagggaattgatcattttcagaatgttgcaagtgggaaaacattacttaataacctaatacctgaaaatcctgttgttaaataaacattctattcattgataatttggatttcctaagagtggcagcagtggatatacatgatttctaaagttctgctatatctaaatatacatcataagattaggttacagaatcattatttttttttgatgtacacatctttgtagccttgtttttcagtcctgaaaccattcttataaatttacaaagcagtcaacctctttgagtgtatttttgatcatctgcagcgtgtaacagcaagcacaacagcaactgacatttggagggttactattttccaagttctgtgagtacagttctactaaaaatttacaagatttgtgctataatgatctcattttgcagtcaaggaaactaagacatagaaaaattacacatttacccaggtcctaacaggctttaaatgccaaggctaggattcagacaacttagtctgactccagagcctgtttatgttcttcatcattgctctgtactgcaagtgtcctctggcaccaaattttatttgttcagcttgagagataagtgatcattaaaagattaaaagatttctttctcacttcttgattcatgatacagaaatatgatgtgagccatgtatgtaattttaaatctcctgacagccagactaaaggaaaaaaataagcaaagcatattttcatacatctttacgccaatacattccaagtattaccatttcaacatgtagttgttcattaataattattaaattaataggtaaatagtaattattaaaattattaatgagctattttactttcttttgcattaagtcttcaaacttaggtatatattttacacatacagcacatttcaatttgccctagccacatttcaagtgcttagtagccacatggctaccatattatacagcaaagttttggatgttgggttctcaactggtacatatccaaataggagtggggcagagggctgtgtagttcaagaaccactgctgtaagctttgggatttcaagtgatacatttctaaaatgttagaagagtccaggttgctaaaacccaatttttatatgagggaagtagtattagttttatatgcttttttcttttttttttgagagtctcactctgccacccaggctggagtgcagtggcgcagtcttggctcactgcaacctccacctcctgggttcaagcaattctcctgcctcagatagtatcccatcttctatctcctgggataggagtatttcagatactcctcccgagtagctgggattacaggcgcccaccaccacacctggcaaatttttgtattttttttagtaaagatggggtttcaccaagttggccaggctggtctcaaactcctggcctcaaatgatctgcccgcctcagcctcccaaagtgctgtgattacaggctagttttatgtgcattttaaaataccagtctgttttcaagataatttgttgctactggctaagatttcttaaagtggcacactttgacagcataaaccaattcagagtgataatattagctgtgttattttagtccactgttaataactacatagacagctgactgacttcaaagaaccaataaaacttggagttctgactgagagccaaataaaacttggaatgggcaaaaattgagtttatgttatctgcagacattgcccttcttggtgagatactgctgtcttctgcttcagagtcccttcctcagccacactatttggtagtgactccttatttagcctatatcttgtaatttactgtggttaccattcttgggaggccattttaagatttcttaaagtgacccagagaaatcgtagcttggtatttactaaatgtgtttgtgtatgttatttcatagctgtatacgctcacctgtgtgtactttttaactgaatttattcatctaccttgaagtaatgttgtaactataaacctgtgattttctctacttttaagctcttccttctgataagcttatctattcatattgggtttaattatagctcagggcataaccatgtgtattattcatctgagtgagtgagcttgtctggcaacaagaggctgttgttgccaaagctttattgtcatctgggctgaatatactctgtctatgcctcattgccagcctcaggaaaaggaggtaatggggtgatgggggaggaatgctgtactctagtcccttacaccactgcttctcaatatattccaaccctttgcaataagctaggataactgtgattttatttacttcatccttttttaaacaagagaaatcaaacactagaaataaaatgtaactctccttcatttcctatctctacatctgtttcctcccatctccccattccacctcatcccttgttgttctcataaccactatcatgaatttaggtttatctttccagttaatttcttaaaagactttgacatagatatgtatccataaataatataaaatattcatacagtaggacctgtaaattcatacagtaggatcttttttttatttatacagtaggatcacattgtacatatgcagcaagttgcttttctcaccatattggtagacctttgacataatttttcttaatataagaatttggtacctatgtaataacgtatctaacacatggtaggtgagaaaacctagtaataaaacagaaagcacctgaatccactgcacacactgagaagtgaaacatacccagaaccattgaaactccagtgtgctgcttctccaacctctgctcctacccaggaaaccactcttctgaacttttttcttactggttttcttttcttacctcatatttatgtgtccctcagtagtatatgtccctgtttgcttgtttttaagctttgtagaaatagtatcctactgtatagattctttttagtcttaattttttattaaatgtatttttaagattcattcatgttaatctgtatattgtcactgctatatagtattcctttgggtggatttacccatttttctgtcagtagccatttgtgttgtttccaattttgctattataaatagtgcttcaataaacattattctcaatgtcttctggtgatacacacatgtaaaagtttctctgtagtgtatacctgggagtatagttgctatgttgtaaaataggtgtacagttgacccttgaacaactcagggtttagaggtaccagccccctgtgccatcaaaaattcatgtataatgtttgactttctccaaatttaactactaataataccctacttttgacaagaagccttactcataacataaacatttcaattaatacatattttgcatgttatatgtatatatgctgtattcttacaataaagtaagctagaaaaaagaaaatattaagaaagtcataaggaagagaaaatgcatttacagtattgtaccgtgtttattgttaccctgagtttacatcatctgtttacaaggtgaaatggcagctaaccacaactacagacctcaatctacagtgtatatcaagtaattcaactttttcttgtaatggcatgacttttctctgcttcttgggactacttccagaatcactagtggcccttcgtatggatcccatggtgttatttaaggtttacggtattgcacaaacacaatgaaaaatatgcgagaactgagagagagcactttttatggcaatacgcaatttgctggagagatgaactgctcatgcagagatgatttttgtcacgtggcattttaggcattttaagcagctattggcaatagctgagttcattgcaatagcaacaggaggtggctacaaaattattacagtagtacagtatgtattatagttacttttatgcagttatgatttaatactctatgtttgtgtttgcttacatttcttttaaaatgctcatggcatcatgtatggtttgtgggtataattttaactttgtaagagatcggtatatattttctggtagtaaataagaaaaactaatatctgtgtatattttgtgcactcatgacgttcctttttcttaatttttcaatatttctaggctagtgcgttgtcagcgagttttttcaaattgtcacaaatctcaaatttttctaatgtattttcttgaaatttagttcatctaagttgacccacgcaatgcagaccctgttgttcaggggtcaactgtatattcaacttaactagatgagcctatattctcatccgaaggaattactcatactcatcagcagtacataggagttctagtttttccacatcctcatcaacatgtggttttgtcaggcattgatttttgcatttgcattttgtaaaataatattactgaattttgattttcagtttcatttccccgattttgatgatattgagcatttttcatatgattattggccatttatgtttccctttttttggaaatgtctatgtcttttttaatagagtctttttttagttgattcttaggaacttgtgtattctcaacactagtatttggtcacttttatatgatccaaatatcttttctgtttgcagcttgccttgtcactctcttcagtcaaactctaatattttgacttttgcatttaaatatttaatccatctgcaacagcatttgtttatttactgagggtaaaaatccagtttctctgtttttcaaatataaaaacttttcctagtcccatcagttgacataaatcaggttttcatatatgtgtggaaaagtttgaggaatttctttgagcttccgaaaaaattttaaaatcaacttgtcgagttttggttttaaaaagcagttggactttttaattggaattatgatgaatcaatttggagaaactgacatttgatatcaggtctccctacccataaacttggtatctccctccatttatttaactcttatgagtacttttcaataagttttatataattttctccataaagatcttacacatcttttatgactttattcatagcttccctacaagacctattgcaactcatttaaaaatacattttctaggggccaggtgtggtccagtgatgcatgcctgtaaacccagctacttgagaggctgagacccaagaatggcttgagcccattcttaggattagctaaatcctaatctcattttgcccttcttttcacctgagagaactaatacaattcactcgactcatgtgggccatattgttttcagcaaaattctctgaaactcagagacatgtgtactgctagtagccatgtggcttcttcacttgctttgttattaattcatcatcatccaacatactgacttaagaggcactaaggacaaggtacaacctgttcctcaagcaccttctagggagggtagaaagaagcattagttgcaaaacacagttataaaacaaaatgatacatcttatcctctacagacctcattggtcatgatgtatgggtcaggaagtcctttgggtggggagaaagaaaggaagattcagatgggatatgatatttgagcagagactttggatgatgaacattgaacctcctttgtgttctcagttgttagcaaagggatcagactagtcattccccagaggtccttctaactttgaaattttgtctctgacatcacaaataatttcatgctttcattaaacatttgtgtttctacctctggcctgtagtccttggactcttgttccataggcgtagggttgtgaatggcaaaagaggatcttggtgttcttttatgaagtgataccaacatatttcacttctaggataatgacaatattggcaatatgaatcttaacatgagagttaactgattaactttttgtgtttttatggaattgctcaattggttatcataaatagattttgttaaattccagcctttatgtaatttctaagcacatttcatttgtatgtcttatttcagtgctggacccaaaggagacaacatttatgaatggaggtcaactatattgggacccccaggatctgtctatgaaggaggggtgttctttcttgacattaccttttcaccagactatccgtttaaaccccctaaggtcagtatgaagttttcattgatttttagcaatatggattatatttctagatacatatacttattcttaaatatgcattctagggatgcatgtctattctgttgtcacagacagcttcccaggattgatagtgtataaaatgaaacaatgtaaaaaattgtaggttattcctccaccccagctttttactgatttcattgttttttttctcctcctttttctcctcattatctcctttctttgttatatgttttaatgtaacattaaaacaccatgttttatgggtgaaaatgggggcataaggttgggccagggtgagtaccagagcccagaaaatcagacgtagcctggagccagagcccaagcaagctaagcgcaagaatcaggctaaaggcagaggaagccttgcctaggcaaggtttatagcaccagctatggaggtttgagttttggtgcctctagagttcagctgctcacatgtagcacacatggactagtatggaaagtatgacccacagagacttaaaagttgtgttaaaaaatttcgtaaagtatttataatagttcattaatgaaactaatcaatgaaaagtcatgtatgttcatgtctgatgtggaagagtgcagtgaaatcagaacatgaaagaatcctcacttatttaagccaaggttatatactttagaaagtcttcacattcttttctactgcctataagtcggatatttgactgttttaaatattgtgtcgtctccattagcatttgttctccactatagcaaaggaaatgaccctgaggacactatgttttgactaccaagaaagaattctcgtctggccctgacttaacgtcacaatgcacagggatagaaaacttgtttgtattgtgggttggagtaaacaatataaaaaaacaagaataagactagacgttcaccatgactttctataattcccctccctcctcttttttgcccctgctcttcctttcttccttcctttccattgatgcttagatagtgttaccaaagcaaaaagtagtagctataattaccctcaatgaggaaaccaaggacagaggaactaagtaacttgtccagcattatgcatcaagcaaattgtggtgtaaggatttgaatctggaaagcctggctccaaagcccatacttcttcctacattacacaatacattttattcaagctgtcagggctggtggcactggtgaccaccaagagcttgcatttggtaggttttcaatgacaaagccatggtaaatctaatacttatcttctccctttactggatgggacccttataccttccttttctactttagaccagcccttatgtcacctggagtatctgttgtactatgagggatgtaaggacctttctttctcagcctctacagtaaaggatgcacagagtgaggaaggaggaggaaaactcagaccaggctattgtgctgcttgtaaatctgatgtgatctgttccttgagattagtagtttcagaaaatgtgtgggcttatcctagttctgaatgacagaaatgtgtagattaaacaaagctagaataagctggggggagagagtcaaatcgcattcttgactttctccactgagtcgtgcactccactgggcatcagctctgccaactcatttcttctccagaacactccagtaagactaggatgttcccctgtcacagaggaggaaacatagatgagacttagagaggttttccaagagtgtacaaccaggaatctactgaagtctgactccaggggccatgtactttccactgaattatacacacttgccttggagaagttgactggtaaaaatagggcgtgggaggaatgctttatctgtcctcacatgttttagggactatggtgtgggtaggggttggactttatccaggatggttggatgggacaaaaatagaagcaggagggtgtcagttaccgggaagtagatttcagttttctctgagggaaatctgacccacagtgggacagtcaacttgtgtgtagctctacctctgagacaccacacttccctttactaggagtgttcaagaaaaaactgagttactacctgtcaagaattttaccagaaaaaatggaatccctccacataatgaattggaccagacaatctctaaggagaaaaaaaaaagcaaactttggtacctataaccacaattcaaatgcacatttgataggtatctgtggaaagtatttaaaagcaaattatcaactcctaatatatcagttttagagatcagattctgtagatagatgtgttactcgagggagaaaaaacttggggtgtagtgaaggctattaagtaaaacaaatactcttattattaatagttttgatgtaacaactccatgccttcctagtgtcctgttactgtaaatagtacatgtttcaagttgtcttgggttttttttctctgctgcttggtatttttctctcttttgctctttttttttttttcacgttagccatgcattttgattcctgcaacatttcccaatactctgaagaatgaaccagggaagcagtgggtgtcagggggaattacttataagagcagatgcttataaatacatctgatgggctatctgatggttatttgtgtggatatacataccataaaattagtccgtagcatgattgggttcatgagataattttttccaaattatcataaatagaaccttttatgaggacttctaaacactgcagagctcaaatgtagcttttaaaggtcagaggaatgattcgagatgccccttcttgttgcaggaactttttcacagtagggcttgatcaggttgaacaccctatattccactgcccaattttttaaaatcagagatgagctattctagtaatttcttccagaatttgcctaaattctaataaggcgagcaaaacaattactacctgagtacataatgttaattaaacttagtattctagttttaaataggttgagtattagtacttttcaaatgctatatttcagtacaatttttagtacattgaatttcttatatgtttatgccttttacttaacctatagcacaattttactatttcaaagtaggtaaggcattttacatagtatcttttcttgtatgacattgtccattgcatttgatgtcaggtcttcagctgagtatttaaccaccaatgataatattatttctctgtgaaaatacctgtttaatagaactccacctaggaatactacattatggccaaaaagaaaagtgtaatgaactgctagtgtgtgtaaaagctttttacacctatttatttttcagtgtagacatatgttttaatgttttcattcagtatctttttaaggtagaagttgctttgttttttggggttttttttttgtcatttggttggttggtttttgtttttgtttttgtttttgttttttgagatagagttcgctcttttgcctaagctggagtgaagtggcacaatctcggcttactgcaacctccgccccctggattcaagcagttttcctgcctcagcctcccgagtagctgggattacaggcacctgccaccacactcggcctattttttgtatttttagtggagacagggtttcgccatgttggccaggctggtgttgaactcctgacctcaggtgatccacctgcttcagcctcccaaggtgctggattacaaccgtgagccaccacgcccggccagaagttcctttacattttgctggggattagcttttagattcatagataattagtttttaaatttatgggtaattactcctcagccaggtgcagttgctcacactggtaatcccagcactttgggaggctgagacaggtggatcatttgagatcaggagttcgagaccagcctggccaacatggcaaaatcccatctctactaaaaatacaaaaattatctgggcatggtgactcacacttgtaattccagcttctcaggaggctgaggcatgagaattacttgaacccaggagacgaggctgcagtgagctgagattgcaccactgcactccagcctgggggacggagcaagactctgtctctaaatgaataaataaataagtaaaattactcctcaaagtgctcaaaatctgtactttattttaaaagtttaatatgtaagtattttaatgttattcattttgcagcctacatatttgttacataattaaaaaacagttgcagataagcaaaagggaaaaaaatttgcctgtaatctcccccaaactgattattcatgccatttaggtatatctgttttaagacttttgtttccttcatttgtatcatatacatataaatatgtacacgtacatgcctgtacatatatatacataaacacacatacacctttttacaaaaattgggccatactccccatggcttcatgattactttttaatctaatgttatattttcatcccgtgccatatattatatatttccagtaaacatttaattgtgttacagttagaaagggtgcctagtattccgttgtataaatataccaaaatttaatcactttcatgtggctgaacaattaggttcttctcattgcttctgttataatcagtgatgtgatgaacattcatataattacacatttttatacttttatgattttctcaggttaaatttgttgctgtggaatttctgggtaaagagtttgcacgtgtttatagagtttttggtaacgattgacaaatcgtgctccagaaaaattctatcagtttacatcgtgaccatcaacatgacagtgtagaacttccctacactcccctcagcttttaggattttaagtcttttttactggcaatagatgaaaagtcgtatcttatggttgcattaatttacatttatttgactacctgtgaaatgtatgacagttttcatgtatactgttgtcctatctcattatttcttttcgtgaataatataaaaaacattttatcttaaaagtcttacatcaaataaaattaacaaggatgcttgaagaattcagaaactaatggaatatattatgttggggttttttcctaccaaaaacactttgaaaatattgtgacactctgtgtctaatgtttctgtttcagacattctttcttttttttttttttgagacagggtctcactctggggcccaggctggagtgcagtgacgtgatcatggcttactgcaacctccgcccagtctcaagcgatcctttcacgtcagcctcccaagaggctgggactacaggcacacaccaccacacctggctaatttttgtttttttttttgtttttttttttgtagagacagggttttgccatgttgctcaggctggtcttgaactccggggctcaagcagtctgcgcactttggcctcccaaagtgctggaattacaggcatgagccaccgccgccggcctgtgttagaaattataatgacttacatcctcactaaggactcatgttaggtaacaggtcaggtgtttgtcttttcagtagaaatgcataggggtaacgcatttttaatttagctttttctgtctccctgtgaatctgtacatgacataaaaaataagtgtaaatagatttgaaattaggtaggtgagagagtcactcatgtttgttttttattttcagtatttcaggcaacttatgcacaggttagacatgctgtgtccatgttcctgggaaacactgttttctctggtaatggcaagaagatagtatctgctggtgataaaatttgtgcctcaggtgttttataaaacaagacaaaaaattacacacatcagtaaagtgtctgtaagtgaaattaagaatgatattcaaaatcttttaaaatataatttgttctttcactacaaattttaccaagtacattttaaaatcctagagatcaattcagagcatatcagtttatgggtttgtttgttgttattttttataaagtctaactatgggttgcttactaatgtcagctaatgcggaaggccttcactgcttttgaaaagtgaaatagatggggtcttcaggttttcaaaatctttatttttctcattagattttaaccttaaattgacaggtcatggctactcataaataaggtagctaattagttacgataagaaacagtgatattcagcatctgaaagccagagagagatctgtaactgaagttcaacaatgagttccacaactgcacccttactctagattattattatgtacttgtttttattgttaatgctactactcaaagaagaaagttgaatgtgtttcccagaattttcagtaagagcagtgatttatgtgtgtaaacccaactacccattcatttactccagccttggttagagaacatgcagttgtcatggaataacatgaattggcttgtttttaacctgagttcgtgcattcatataaagcttggccatgggtcaagttctttcttacattttgaattgcctatttgacatctctagttgaacatccagtagtcatctcaaacttaacaaatccagaaccaaattattgattaccccattctacatcagccagaccagctcctctagtcttccccatatcaatgaatgtcaggtctttttttccagttgctaaaactaaaaaccttacattcattcttgactcctttcacacagctagccagacccagtcccactggctcaatcttgacaataaatctagaatccaaacatttctcaccatctttccctagaaactctttggcgcaaaccaccgtcaactgttctcctccctcagattattgtggaaatctcctatgtggtcttcctggttccacccttgtcccttcaacagtacaccccatatgctgaaagattccttttttatttttttggctggaatggagtggtgtgatctcagctcactgcaacctcagcctcccgggctcaagcaatcttcccaccccagcctcccaaatggctgggaccacaggcatttgccaccatgcccggctaattttgtatttttgatagaaatggggtttcgccatgttgcccaggctgatctcgaactcctgagctcaagcaatccgtccgcctcagcgtttcagaagtgctgggattacaggcatgagccaccacacccagcctaaagcttccttctatagtgtgtcagattatgtaaattatttgcttaaacccttcagtgattcccagctcctgaataaaagcctataaagccatatagaaccaccccgtccacagaacagttttcaaagtgccagccatcattttttactcaaatactcaaagcatgcttcttcacaagcctttccatttgttcttccttctgcctgcgtttgtatgccacccagaaattcacatgactcacttcatttctcccttgatgtctctgctcaaatgtcaccttttcagagaggttcttggatgacaaattccaacctccttaggttccctataaacttcctcaaacttcctcacaaccactagtatacttgattttttgctatagcacctctccctcttggtgttatatatttctttgtttatttattatgtttccctttccccaattagcatgtaagctcaatgaacacagaaactttgtctattttgatgtcactcctttaatctcatccatgtagaacaatacctggtgattcagtaggcagtcaataaaaatttgttgaattagttaaatgcatgtaactgtgccctaagcaaaatgtttattacccccacttcatggatcagaaaactgagctccatggaggttaagctgcgcacaggccacaaaggaagtaggtagcagaaccagaatctaaacccagttctaaactgagccttttatctccaattatagagaaggttgaggttgcttatatccctggaagaaggaatacttgttcctggattatacactctggtatgaattaattatatcacattattctccaacccaagtatttttgaggggagaggaaagacagtatgaggaggaaagagatggtttgaggaggaaagaatgttagaagagattttgtgtgcctttctgttttgccaggaatcctctttccgaagacactgggggcttttcttcaatatgtttctaattcacagactaacgtgttatatctacgttaaataataaatattgatttctggattttgccagctttaaagaagttacttcacatttcacagatcattttcacatttaactagtgtcagaatggccttgtatcctcagtgtcatgactgggctgtcataggtttgcttacatcacatgagtcagtttttctttttggtccgtgctccttttgataaacttttaataatggcatgctatccttaaatgttgtgtgaaatcccaaaatgaatgtgatgattaaaaattgatcaaaatggtgtcattgtctttgtgcttttaaaataatgcacattatatctgtgtgtccagccaccacctacaattaccaccagtttagtaattactaagaagtaggattgggttttgttttcagggcaaagaataccaactttattgtaagccaaattaaatatgcctataagctaataggaaatcagccttttggttgacaggaagtttaatttagccatattttgggaagatacgtttgttcctagctttctatagtctaatgcagtttgctaattttaaagaaggacctttagtttattattgtctcctgagatgcttattgctcaagccagcttaatttttcaggttggatcaactcaaccaactgtacgtttgcacaagccttgaagaggtggtggtgaatcagccactctgatatctactgacacacccttataagagccctgccataaaggtggaggtttcaaacaagtattttactgtgcttctccatgccctggagttcctatctctgtgaatgtgaccgcactctaaatggaagtttgtgttggttgatattactgtcagcataactgggaggggtagataggcctaaattccttcacgatggatgttcttccgcggagaagttatgtgaacaggggagactgaagtgagacattcagaagcttggaaaatgaggatcttctttgccttcagggctcagaaaaggttcaactcacttaccaaagaggggtgacttttctaaggaaagattcacagatgacacaagtgataccctcccctcacgtgagttttctgaagagagaagggtagggtaactcctccaggtacagtcttcagtatcccaaacatcaaagggtattgagtgatccactcactggtcccataaaacagtgaacactggaaactctgagagaaacactctaagcacataaaatttaaggacaataaaatgatactggaagaaatattcttgtaaagaggaaaaccttctgtagtactgagccagatgaagcttcagttttggcattttcctaaccttacaggaaagggcttttatggaaccagatcaagacatggaacagacaccctgtgttgattgtctgtaaatttgaaaacaaattatatttcattgtccacttgagagatgggatggggaaataatattctacgtgtgatgaaaaaaagtataatattctccactttatttaaatatgttacttgcttagatagttatttgtgacgttattttgttcaagctgggatacagtaggcaggtctgagttcatttctgagactgcctgccaaatatcaatccctttatggcaagtgatcaaatttccttgattttttcttttttttaatatatatgtttttttattatacttgaagttctagggtacatgtgcacaacatgtaggtttgttacatatgtatacatgtgccatgttggcgtgctgcacccgttaactcgtcctttacattaggtatatctccgaatgctatccctcccccctccccccaccccacaacaggccccggtgtgtgatgttccccttcctgtgtccaaatgttctcattgttcagttcccacctatgagtgagaacatgcagtgtttggttttttgtccttgtgatagtttgctgagaatgatggtttccagcttcattcatgtccctacaaaggacatgaactcatcattttttatggccgcatagtattccatggtgtatatgtgccacattttcttaatccaatctatcattgttagacatttgggttggttcgtagtctttgctattgtgaatagtgccacaataaacatacgattttttcttttcattagagttggagcaggatctctccgtaaggtagcagcctcttagagatttgttcaaggagatctaaagaaaatgagacagagagaaatgaatgttcctagtttgcagctgtccaagagaagagtcagtacatgatcatggcttattgatgaattagagaagataggaccacctgtcctttcgcaggtgtggtgcaggtcttgtcctgccaaaaataaggagaaacaaagtcagacagtcaacaaaaattataaataaaatgcatctaggggactgggcatggtggctcacgcctgtaatcccagcactttgggaggccaaggtgggtggatcagttgaggttaggagtttgagcccagcttgaccaacatggtgaaaccctttgtctacaaaaaatacaaaaattagccaggcttggtggcacacgcccgtaatcccagctacttggaaggctgagacatgagaattgcttgaacccaggaggtggaggctgcagtaaattgaaatcatgccactgcactccagcctgggtgacagagcaagactgggtcaaaaaaaaaaataagataaaataaaatggatctaggatcagacaaagttattcatactgattcatataagcatacctattctaaaccatcaggtgaatttttcttatggtatcagtgtattagctgttaacagagacctgccaaaaattcttgtaggttggttgcttttttaaatacctgttttaaggctcatttataaagcagaggtttattgagcccctactactttccaggcccttgatatataaagatgagtaagatacagccctggaagcatggagacagaaagaacaattaggggctgacacaatagttcagcccagaaaagaattaaggctcagctgtgaagataaaaacaaggagaataatgtataaattctcttctcattccattattaagtaatcatgtatgtaccatgcagtggtctagatactgaacatagagaagtgagcaatggcatgccccatcttgcatagaatttacattcaaggtatggtagaataggattttttcaactttgacccagctgacattttgagcaagataatactttgtagtaaagggctaccctttgtattgtagaatacatagcggcatgcctgatctctacccactaaatgccaatagcaatctcccctgtccctcattgtgacaacaaaaatttctccagatgttgccaagtataccctgaaggaggggatcaccctgttgagaaccactgtgttagcactgacatccatatctactggtgactagtttgaaacatcaggaaggactctctggtttctgatctgaatgaccaggtagggatatgttgcctgtgaggaacttatgggacacctgagtgggaagtgcagaaatgttcagccaacagcttaatagatctggagttcaggtgagtcatatgagctagaggtactgatttgggagttagcagacacagatttgggtgttaaaaccctagatagaataaatgatctcacctagagaaatgggcaattttcaacccaaactgaatttttgaacctatgaatttccagaatgggttttccaaaagaaaagaatgatgactgaaaaaactaacaaagctgatattttctctttttcattaagttctcactgtttggggattggaaagttattttccatatagagtattattgctggaaagcttatataataatacctcataaaatatcatgcttttattacaaggaaaaaacctcatttgttgttaataaattatataaattaattttctcacaagtgcctaaatcaggcctaaaataagtcaaaataattacctgtagttgcagtggccttctgcagggcaatggactaaatgactttttttaagctcctcttgagcctttggtttcagttttaatcgaactaaaacttatataagtaatgtgattaggatcacatagctaataaggccagggtcaggattagaactcctggcctcctaatttccagtcctgcagcccctactcttcacacctgaaccaactgagctatgaagtgatcttggtaagtgcacagtaattcagttttttgcctacagcctttctttcctgcctgcctgcctttttttttttttttctatttattttattatttttgttttttgagacagtcttaccctgtcacccaggctggagtgcagtggcacgatctcagctcactgcagcctcaacctccagggctcaagtgattctcccacctcagcctcccaagtagccaggactacaggcatgtgccaccatgcctggcaaatttttttgatttctgaaagagattaggtctcactatgttgtcacgggctgatctcaaactcctgagctcaaccagtcctcctgagctcaaccagtcctcctgccttggcctcccaaagtgctagtattacgggcatgagccactgcacccaaccagccatactttaggtcactctttgtgttcttttctgtagtcccttttgcctctatttttgtggagaattaaggttaaataagattttttgtttgggcacttaccaagttgtatatctgtgtatagactgcgctcagtggctcatgcctgtaatcccagcactttaggaggccaagacggccagatcacctgaagtcaggagttcaagaccagcctgcctaacatggtgaaaccccatctctactaaaaatacaaaaattagccaggcgtggtggcgcacgcttgtaattccagctactcagtaggccaatgcacgagaattgcttgaacccaggaggcagaggttgcagtgagccaagattgtggcagagcaggaccttgaccatacatacatacatacatgcatacatacatacataaaaacttaaaatatctgtacatgtacagtatactatatatactgtgtatttatgtttcccccatacttggccactaatgcattttaaactctatctctgtggataaaacattacagtagtttgttcaacaaggaaataacatataaagcaatatgtttatttcaggttatttccagtttattttcttcatttcttttttcttttctctcttccagacatcactacttcttgtagtgatttgcttttaaaaccaaactatttttctttttaaattagttttaaataggtaatatatatacacagtaaaaagttcaaacagcacaaaaggtatgcagtcctcctcattgcccagcattcccgttaccttcccaaagacatcttttattctgcatttactttttgcatttaccatcttgaagattatcccatatttgtatgtgtagatctttgttagaatcacataatattatattgaacaagtgtaccataagttttcctgtgattgacatacagggattttttttaatcttttgccatcacaaataacgtttcactgagtatctttgtacatactgtctttgtggacttctgcaaatatatccgtgggataaattcctagaagtggaattactgggactaatgatgtatgcatgttcaattttaatagattctgcccagattgccctccaaagaagctatacaaagttatactcccaacttaggcacacctgcctcttttcctacatccttatcagtgctgtgtgacatcaaatatttgacctttatgaatctgatataaataaaagaatatttataattgctttctctcattataagtaaaataataccttttcatgtgtccagaatttggacttttttttattgaaagtaagtgtacactttttcttattgaaagagtgtgaagagtttccatatagaaacctatggatgtagtattttcatctgtagaaagaggcttaacagtctctaagtttcctttcacatctttaactgtcagtgatttgtcactgccctgcttaaaactcttcagtggcttcccattgcacttagaataaaatccaaacttctttgtcttacaaggccctacgtgatctctctgcctgcctcatcacatgcaggccctcctaggcctcctttttgaccttatgatttgccagtacatttgactggaacatgtttgatccagttcttcatgtggtcaataccttctcattgttcaggactgttcagagttagatcctgagaggtacattttctgaccaccttctataaacagtgccacactagttgttgctgtcacgtcaacctgatggtttctttctcacgttaccttctaagatccaaagaccttatgtgccttacagtacctggcagatatgattgatgaagcaaatgaatattcatttagcctgtgtatccttaacacttctgaaatcttttttgccctgttggtttgtagtactgaaatattgtgcagtgtgtatgtgttttcattctcattctcccatatctaatcatatctaattcttatacccagaaggcagggccttgcttttccctgaagatgcctgccataaaggcatccagtaaacccagtagaaagtaatattttattattattattattatttatttttgagatggtgtgtcggtgcctgactgcatgagaaatgacaaatggaaggaggctgagcagacaagtttgagaaagcacaaaaaagtggttaaagaacttcatcaagctgagacaaggagaaatgtcttaggagtctggtcaaatagaggggtttcattcaaacaaaaagccaaggggattaagaattgaggccacagtactgaattggtgaactccgagaatgtaataaaagtatactaatgaaaaataagacaatgattaagcaatagataaggagtaggaataaactgcagtttgtcttcagtttcagtattgggtcaaaatctgctcttaggtttaattttgatcttgtcctttggaagaccaaatagctgaatttctgattaatcatttccatcatctctgaacctggcatgatcaatgattgtatgatttgtactaaagaactgaccttcatgttttctgaagcttactctcaaatagttgtagggacaaaataaacttggggtgtgtgtgtgtgtgtgtgtgtgtgtgtgtgtgtacatatatatagagagagagatacatacatatgtatagagagagagataaagcagatttagcaagctgttaacagttggtgagtctgtttactataggtttgaatttttttaataagttgaaaaacaatgaaaagcaaagtgaaataggagatatttcctcctgcaggtgtgcacacacatgtaaatacctaacatttggagcactgttgttgaacaaacagagtggcagggaaggctttctcaaggaagtattatttagctggtccatgatggatgatagaatttcaataggaaggagagagaagataggtttatcaagctacagaatgacaatgtttttaaatgtgaaaaatacaagccctccctcctccttggacatggataccatctcctcctggcaattcgattagtatgggtgtataaccagcatatactccctgtaaaaattagacagacacttgaaattttaatacgttctcattaattaagaacatataaaagtggtataaaaatttgaagggcaaggtgcagtggctaacgcctataatcccagcactttgagaggctgaggtgggaggatcgcttgaggccagaagttcacgacaagcctggacaacatagtgagatcgcatctctacaaaaagaaaaaaaaaaaaaagaaaagaaaaaacgagccaggcgtggtagctcacacctgtagtctcagctactcaggtggctaaggcagagcttgagcccaggagttggagatagcagtgagctataatgatgccactatactccagcctgggcaacagagggagaccctgtctctgaaaaacaaaacaaaaattaaaaaggagcaaccagattaatgtttcttaagagaacatttcttacatcattccactccaaaaaagatgttgaagtacatgtgcatgctttgaaagctaacctgcaggtggaaattcagaaacagttgtatcttggataccagttacactgttctattactgtatttctagatacatagtttaagaacaacttttttccctcaaaagattgtgtgaacaacaaatacaagcaaaaatattagggggagaaagaatatatatcagagcaatagcattgtttgttataaaaatattcaaagcaccttcttagagcagtgcataaaacttgagtttgtgagattacttcagtgaaactgcattataactgtgaaccaaatctgcaaaacagatggttgaaagagataatgtttttaccttactcagttggtattagagaagaaaagcctaataacactatggtaacagactctgataccagcagtatctataacaaaaaaaatcttgttcctccactaggctcagtataaagtaagcagatgtatattatagcagtcaacagtgtttagaaaatactattcctgcagtataatatcaaagtgaagacaaaattcttaaatatttttaatagtgaaagtgtaatagttagaaatttggatgaaaaaatttattcttgtatcctctattcttaacctttttaatagatttatttttatgaccaataaaggatgttacttccaaccaggctaaaagtattttactatgtgactgtataaactaatgatacaggtttttagtacatacctgagaaatgagtcttattaatttaaagttttacaacatctagctaaagccatccatctaattgtgggacctctagatatgtgttctttaacaccttagaacatatcagtttcatgatgaacatgaccactttactatgatgatatgttagtttttacttcaaacaaaactatttatttctgtcctttaataccactagataattttgactaaaataggaggaaataaatgaaacactgaccaatacaggcctttgaagaaagtgcattcttctaatattgtcagaacaaaagtccatgaatcttcttttaaaggaaaaaaagcatagttagtcttttctaccgagacatcccagctttttaaattatttgaactgtttatttgaagtagacacaatgtagtgatatgtgccatgcttctggaatttctatgagttttattttctaatatgaagaattaatgaaatatttaaaatctcaactctgcaattaatatttaagacttataatctctgtcgactaaaatactaatcacaagactttttaaattgccttaaatcaaaatttgaatgacaaagcacatttccctacataagctttacacatctctccattgacacctcccatctcagactcccaaaaagaaggcactgtaaacctaactgttgaaacatcagaagctctcgatcaattgtcatttttaattatggtatgtgtggcctcctttcaaatgtaaatattctgtgtttttccagttaatttgtttattgaacaaatacatgtcaatatcctctttcctagaggggataaaaatcagtatcagagataatccctgtccttatataaatttgttccctttgtaaataaacatttttgctagcctgtctacaaaaaatttatttctgaaatctttatttagctgtacatacaactatcagttttgtaaaatgaagttggcactatttatttaaaaagccacatgtggtgcagttgtttgcttctaaaaggtggtattgttataccacagcagacaattttctactagatagaaaatttcaaagataaatgttgcaaattatatggaaaggaaaacagcggcctagagtgtttatttaagatagtacttcagatttcttttagggacaggagattcaggaagcaggaataaaacattagaaaatgggaattttttttttcacacaattctgagtcattcttattccccctactccccactcttccttttttctttttccttgtttctatcagatacatttctacacagctttaaggaaaattaacccattttttttagggcagtagtcttacagagaatattggaggggaaaagataaacccaaaagaacaggctttggaagccgtggaatgtgaatgaagcaagatactctagaaggtggaagtagagactgaagaaatcatgtcagaaatcatagagtggtagcagagattagatatggacaagtggggaatagagaagaacagaagagagagattgcctgggataaaagaaaattaggcatggaaatttaagtggaaaacaaacccaggtagttaccattagatacaaataaaatttaagatattcctcataatactacatattccttcagtaagactaaaaagtaattcttgaatgcttgccacgaaggcagaaagaggtatgtttgtgatagtcctggagttgttgaaatgagctgtgagctagtttatgtttacagtgaggaaggaaacttagatccatccttataaggatgccttgacctgaagagtcagaaggcttgccttaggctcttctcatatatttgctgccttccttttcccctctccgatattctccacagtgggttccaggaagtggtgcaggcttgatgggaactggttttcagtaagttctggctgctgtgtgcctgcagtgccttgtccctttttccctctgtccctgcctcagattgtggattgtgttgcccatgttttctccatctccccctcccttatttctgtttcacatatattcatttctttcttggtttggtcagctgttaagacaatattcaaagaaaatggtattaatcatataaaagccattttgtgaatttaggaataagttagtgtcatctaccacaaagcatttgttccacaaaaggctaatttgagaacgaacatcatataacaatcctgttccaaatccctaaaacacctctttcatcatggcattctcctaaactgcaggatgaaagaccagctcctcagtttgtcattcaacatctactccttcactccttccctaagactccaatcttattttctaaccatttttaagtaaaccaatatttgtatgtcaggttggttgcaagggggtcatatatcaagcaagaattagcacattctcaaatagaaataactagcttagaaaattaagtgcacttctactttaccaaggtttttttttttgctattttattcctttataacaaatgcttatacattatcatttttctattttacaatctaattcaaatcatcacatagtattagtcatgcctgttataaaaccaactaaaactttcaaatatttaataaaagtacccttttttatttttcaagtatgcttcctgattagctgttactttcagtgtacagtattatgagtatcaggttagttaactacatctattctgcatagatgtttaaacaatattcactagaatattctgtgtgctgagatttaagttattcaaagattatacatgttaagtgagagttttcaagtcatgttgaaacagttgtttacttttttaactgacttgggtttttttgcctttagtaatctcacaatagtaatagtgaatatatatatgtgtgagggttttttttgttttgtttttgagacagggtctcgctctattgcccatactggagtgcagtggcacagtcatggttcactgcagcctcaaccttgtgggctcaagtgatcttccctcctcaaccttctgactggctagggctacagacacatgccaccatgcccagctaattttttttttttcattattttgtagagacggagttttaccatgttgcccacgcaggtctcttaactcccaggctgagcctgagccaccacacccagccatgaatatcattaaacatttcttctcttcgctattcactttacatgcttgatcattttgtcagaacttgatctgagaaacctgttgaatccctgtgtcattagctttgctctgtaaagtcaaactgttgagatctggaatttacataattttctttattatttttttctgtcattttctttaattaaaaaaaaaactttgagggtgtggggttttcatttgtctttgattattttgtattttccttataagctttttgcttagtattggaattgactttactgtgaggatttgaattcctctcaacctatgtctgtttcttagtaataatagtacccaccttacaggatgagtgtgaagattatgtaataaatgcaagtcacctaggacagtgcgtggcacataaacatggcattattggtagctattttaattattactattatttttggttacaacttactgtttatacatgtggtattttttaactttatggtaagaacataggggaaaaatatgattaccctcaagtatgcatacaaagtttggaaatttttatagtatttgtgaatactctgctactttcaaagaatgtctcttttgtgtgttgtacacatagcattcaaccaaaagagtgggaatttggccaactctataatagctgtaaatttacttatcattaacagaatcagtcattgttttactatatttttattagttttagagacacagagtctctgtcattcaggctagagtatatggtgtaatcatagctcactacagcctcatattcctgggcacaagctgccctcctacctcagcctcccaagtagctagtaatacaggcacacacaaccatgcctggatagttttttagttctttgtagggacagggtcttgctgtgttgcccaggctggtctcagatttctggcctcaagtgatccctgctcctcagcctcccaaagtgttgggattacaggtgttagccaccaagcccagctcatgtttttttttatatcatgtttaaatatagtttacttctacacttttgtaggctgtatgaaaagctaaatcatcacttctagctagtttgacaaatactttgtattgtgttgtatatgaactggattattgatctcttaaaataaataactgacccttcatatatctataaacataaaatgtattactcctttcctgaaggatggagtaatcctgtacattattttcattttacatttatcaaatctgtaaatatgctgcgtcttacagaattgccttggggagtgtgagacctataaaaaatgtaaagaaaagaaacgaaaaggaggacattctccttctgtttgtgtttatgtcactgtctttagttaaacagcaagtgtgatatggtcagtcatttattacatgctttacatggaatccattaactatctcagctgttgtgcttcctaattaattgttgttatgtatgagacacttttgcagttctaaagccagaaatgaatcatcttgtctaagagatgttggtcctttggacatctgttaaattatcttctgtggacagtactaattgataaataagtgctgttggctcaacatagccccacataatggttgttaagtttgttattcaagagcaattgttctagtacctgactgggggagactgatgcctctaggacaagctcatccaatccgggcccaggatggctttgaatgcggccaacacaaattggtaaacctccttaaaacatgataaggttttgtttgtttgtttgtttgttttagctcatgagctatcataagtatattttatatgtagctcaagacgattcttcttcttccaatgtagcccaggaaagacaaaagattggacacccttgctccagaaggaagattaaaccaagaaagctttgggttctggttttgatggatccccgtgtaccccccacccccccagcactaattgagcacctactatgtatgtgcttaatgaattaaagcagtgtgaatgtttaaatgattatttgtgtacctgtttaagtttagataccaggttatctttatttccaccacagttgtttggtggaacagccgtttttaaatccgtatgtgattatgttattggataacttgtcctaaggcacaaaaactcatttgtagaaaactcatataaccagctaattttttttttttttttttttgaggcagagtctcgctctgttgcccaggctggagtgcagtggcacgatctcagctcactgcaagctccgcctcccgggttcgcgccgttctcctgcctcagcctccggagtagctgggactacaggcgcccgccaccacgcccggctaattttgtgcatttttagtagagacagggtttcaccatgttagccaggatggtctcgatatcctgacctcaggtgatctgcccgcctcggccttccaaagtgctgggattacaggcgtgagccaccgcgcctggccataaccagcttattttttaaattccttgttttaaatttctgttttgcttttttgagtaaattttttaaagacttgttaaaatctaagccttcaaatagtgagtttgtactcttagagttttgtttaatttctgaacccctccacttttttttaacccattgagaaggaaacctctatatgcatgccaaacaagcattgattgagctggtttcaggcaactatgtctttaccagatagtatctccttcaaaagaaagtatttgagatgtcatctgtaggagacttctatgaagatttgaatctaaatcagctcttcttttcctaagggattattttattttattgccttatgttttggcatatatggtacagtctagtctcaaactagtgttacctgaggcccatgaagatgcaaatgcaaaacattccacagtccaaagcacatgggacttctatagaaagaaaaaaaaatgcccactgagaatgaactcacactcaaagatttctgtctgtaccatgatacaatctaccattaaggagaatcttctggaataccatttctgaaacttaaaaaaacagaacaagtcaagagacaaaataattgtgtaaagataaaaaaatgaaatatgaaatataatgaaagaagtaactaatttaaaaaaaacacaaatttagaaaagaaccagtgaactttattcattataggtatgttccagaaacattctatataaactgaatttttataaattgcaaaagaaggaatctgtttgccccttatcaagtcataccaagcatcctgcgctgtaggagttgagagtaatttgctgtattgtaggaaagagcactgagaattgaataagatgctcccaatcttctaagagatttgcttcccgtgatggggaaaattttctagttgcatgtttttctacatttatacataaaaggaaactgagaaagacttttttcaatttaaatgtctgtggcataaaggtcttttgttttaaatcatttgaattgtacttgaaagctaaaagatagtagtcttatcatgtagcatgctctagcatgtagttagtattcacagctggataggtgtcatctttatgcattatggttttcaggtgatgtttaatttcagttccttcactgccagttattcaagggccagataatattcctatggggtggggggctgggggaaggtggtgttctgttttgctaatgtgtatttcttagatatacatatttttcaggatttattccctcactataatgaggttttccatttttattttgtcactaataaaaaattaattttagggtgtatgttagttattggtgcagtgctctcaaattggttttaagaaaagagcacttgaaatctcaaagaggggattttttttttttatgtatactaacaacctgtttaaataaactgtagtttcatagtgagcctaatgatgttaaccataccattttagagctttgttacatgatttactgattcatggcatgggggcttcaaatatttgtggggttggggggttctccgtggaaaagtatttttaaaaagaatgttctcactgattgcagattttctcagtaaaagcaaggcaccatttatgtccttatcaaaattttttgaaaaattgaaaaacattatcattgaaaaattattttaaattgttattttgaatgttattatcagaattagtttttcatcttggaggtgcttacttttaaacatctttctaaattatgtttagaatcagtttgtcagaaatactgtattaaaattttttttatatttatgcctttcatgatctctgtcctcttacaaaattactttttatttatatatggagtcttgcctataccttaaagtgatgcattctcagttaatcttataactagtaactaggggatgtaagagaagggaagaagaactaatactcattggattcctgctgagtgccaggcaggctattagaaccatttgtgtacttcagtcttcacagctactgtgggtatagctgttattttcctcattttacagatgaagaaactgaatctcaaagatgttaagtaattcatccaaaaagagaattccagcccaagtccagctaactcccaaacccatatattctttccacaatacaactcatggatcatggaactagaataagccttagaaataatctaagcctcttgttttgttaggaaagagaggctcagagttgcaaagttagttatccaagaatgctactgtgttcttttatgctttagtcaacataaagaatgttaactctttctagaattatttttaaggagagatgattctgtgaagtacagaaatagcacagcttcatttttaagtaccttttaagagaaagtaatgagacagctgggagatacagatacacacagacacacagacacacacacacacacacacacacacacgtgtgcactatattagtttcctgttgctactgttacagacttagtggcttgaaacagtatgaatttattgtcttatagtcttatagttccgtgggtcagaagactcaaatcaaggtattagcatggctgagttcattcttgaggctttaggggaaaaatccatttccttgcctttttcagcttctagaggccaactacattccttggctcatggctccttcctcacatcacttatcacatcccctactactgaccctgatcctcgtgcctctctcttaaagtacccttgaaattatattgggcccacctaaataatccaggataatcacccccatctcaagattctccgcctaatcacaaggctgtttttatcatgtgaggtaacattcacaggttccaggaattaggatgtggacatctttggggcaagagggcattattccatctactgcacatgtgtacccacacatgcaggtgttgggtgtgtgtttatcacacataaattaaaacctttgttatccagggccatctgggaattagccattctaaataaatgttttctatatcgctatatccaagtcgtatttttaaaatttcctttttatggaaaatgttccaaaaggtgctgtcctccctgcctttgaaaactgttattctcaatataattttacctatcattgagaaaaggtggctaccattgtaaacatcagttattgagctatgcttcaaatacagctataaatgccaatgtaggcgtaactagtttgatacacagaactcagcgggtattaacccttgcaatggaagtgcagtttgctttatggtcattttttatcatttgcttgtttgtcaggaacatgacatgaaggatgtatagctgcccagccccctgatcaaaataatgtgatgggctttctggaaaattgagtcagagatcggagtagtcttgtaggttaagggtgggaagacttcttttctcagcctctaaacttctccttctggcagttgcaaattctttgctatttgtcactattcaaaacattatttcctatttctgaatcactaatatctaaggaccgcaaacaattccttatcagtttgcaagtattctttctcattttccctagtttgttgataaggtctagaaaagaatgctggctgcttcaagggcttttattagcgagtttttaccttgattgtagaacatgtttgctgatgtaaccagaccactcatttcttaggttctctttagcatttaaataggaagtagcagcaatacaaatgtttatgttggagtgcccggcacatattgaatgcttactgaatttattatttctattattagtttagcctatatgaagccccttgtgaaataatattataacctgtaggaaaatttagtaaaggaacatgggacagaaaaatgttaaagagatcttctccttcctcaggatattctctagtcttccagcttttactcttaagttatggttctaaaacgctcttttacctaaaaaacaataagaggttataacccctcagagaccacgagcctgtggtgtgttagcatttgttcaacaaacagtgggctctttatgtatgccaggcagtgctttggacatcagttgaaagacaatactttcatgagtaattcatgatttcatgaggaggtcctactgcaagtatagtattgaagtaggaatatgatggcaggacccccaaagaggagattgcttacatttcaatagataaacacataacacttcttaaaacttagggatcaagattttgtttcctgcttcaaaaggtggtagttgtgggagtctctgacattagaacatgttggaacagtcagtgtgtctgtttaattcagtgtggtttaattcatgaacacctgtcagaatagaagttgacaaacatcatcatcaaagtagatccttttgttatcattataaaatattcaagtttaaaactctgtccagaaattcacaggattctttgcaaactcaaattttattatttttcatccagttatactttggttttaacgaaatgtctccatttaaaacaccataaagtcaacaaaatttattaaaatttttaataaaaactgagcaaaagatgtgacaaactgtagaggatatccagataacacataaacaaatgaaaaagtgttcaacattattagcatttaaggaaatgtaaattaaaaccacactgaggtatcattacaccttatcaaaatggctataatgaaacatagtgataacaccaaatgctagcaaggatgcagagaaactagatcacattgctagtgagaatataaaatggtacaaccactctgggaaggagtatggcaggttattataaaactaaatatgagcttaacatatgacccaccaattacactcttgggcatttatctgagagatataaaaacttatgttcacacaaaacacatacacagatgttcatagcagctttatttgtaatagcttgaaaatggaaacaaccctgcgatattgtgatttttaataagaaatatatactatttggtcctgatttttggcacaaagctactaaaagccttgcgatctcagaaatgttaagtgtcttctgatgctaatgaggtgactggtggctggggtctcctggaaggcctcaggatggaagctggttgccatcatgtcacaatcatgtgattagagggttggaactttcagcccctttcccctataaccctcagggagaggagagcatctgaaatttgagttgatcactaatgaccaatgatttaaatcaatcatgcctacataatgaagcctccataaaacccctaaaagcaaggttcagagaggttctgggttgctgaactcatggaggttgttgtaccccaagagggcatggcaactctataccacccccaccaccccaccccaccccttatggctcgtaccttaccttatgcttatcttcttaactgttcagctgtatcctttgtaatatattttataataaaccagtaaaggtaagtaaaacgcatttatggattgtgtgaactgctttagcaaatgattgaacctgaggagggggttgtgggaacccccagtttataacagtcagaacttggattggcatctgaagtgagaagcagtcttgtgggactgagacctaaacctgtaggttctgactctaaatccaggtggatagtatcagaattgaactgtgggacacccagctagcatcagaaaattagttgtcaggagaaactcctcaccccacatttggtcacagaagtcttctgtgttgagagagtaggaaaaacattttgattcttccaatctcatagaaacccagatgcccttcagtgggtaaatgggtaaacaaattggtacatctattactgtttggttcttagtcttatttggagaaagaattctgccaagctactggtttagccagagaaagagaattcattgaaggaaaatacagagtagggagtttatctagagagacagtacactctgaaaagatgaggcagggcgagctgctgaaagagagtgagccagcagcaccccgagagtggtgggtttttatgatttcagattttttcttgaagttcctgcctctttcttaagtctccgcctttttactttgtttagttttctgcatctgccttaagtccctgccttttccctcacctagttcccgccccaaggttgtgggaccctcccttactattggtgtgcacgcgtgaacccgatgttggacacaaattgcttctgcgtatctcttaggaattttctcctttgccctcttccctttagcatgcatctagctacattctggcaggttaactggcagagtgagcaatcactggggtcttaagggggattcctttctgcctaggtatttcccctcctgtctgttcatatctagcacgcctgtttggggtgatccctggggcatgagattttccagactccttttctcagggcagcccttctcctcctcatgtctgtttatctgcctattctaccacatctatgccgtggaatactactcatcagtaagaaaggaacaaattattgacacgtgcaacagcttggatggatcttaagggaattgtgcagagtgaaaagaaccaatttcaattggttacctactatacgattccatttatatagcgttcttgaaatgacaaagttgtggagatgaggacagagttgtagttgccaggaattgaagtaaagggagaaggcaactatggctatcgcagggtaccatgaagaatgtttgtgatagagttgtttgtgtgttgactggtggtattcacacaaatctatacatgtgataaaattacatagaactaaatatacttaatatgcatgagtgcacataaaaatgaaactggaaaaggtcagtggactgtattaatgtcagtttcctgcagtatactgtagttatacaggatgttttcattggggaaaattgagtgaaaaatacatgggatctctttatttcttacaactgtacatgaatctacaattatcccagaattataaatttttaacgaaagaacagaggcattgatgctgagagacaaaccgtaggcttttggatcagcacaattgtgttcaaattctggcttccacttaccacttgtgggatcttgagccagttctttaacctccctttgccttagtttcatcatttttcaagtggttgccaataatattattttccctattgagttgttttgagggttaattatcaatattatgtaagccactcattggttaaattgggatcgtaaaaatattttatcttttcatttagcacttaaagggataggcactctgccttctccagagaaattttaatatcacgagatagtctctgtttcattaacttaggctagtgtctttatttcttctttcatggagtttactctgttgttcttttactaccttcctgagttggacacttaactcattaaatatctgtcttccttcctaatgtatgtgtttgaaactgtagatttctcttttacaactgttttagctgagtcacaaaattttgatattggcaacccaatattttcattgtcattcagcaataatagtaactgatttttttctttgatccaagaattatttgaaaatgagtttttcagtttccaaacatatgatagggggatcttttatatgtagattctgactttacattatggtcttaataatgtcaattctttgaaatatgtaaagcttcttttgtggcttagcatgggatcagtttttacaaatgtttcttaaatgttccttaatcattaagtgtaggattgtgtcttcattcactcccttgattttgtttatccaattgttcagatctccaatatccttactaatctttagtctggttgacctatcagttactgtggtgaaaatgtccctctttgattatagctatgtcattttctccttataattttgcacatttttactttgtatacttttggctatattgttagatacagcacattcagaattgttactgttttcttgatgagttgtttattttatcagtaacgttctttgtttctaacaatgctttttcccttaaacatattttgatctgataatatagtcatttaagctgtttttgttagctagtgtttacacagtatatgtatctaggatttagaattctcaggaaaaacatttctcttctcattctagagcccacgctttctttggtaagtttctttgctatctctgtcataaggcatatcttttcaagtccatgcatttactgaaagactagccattcgagtttcctaattgatataagggcgctcaattctaaattcttgcaacatacaggcctaagatttcatcttctttttccatgagggcatcaaaacccaaacctccactttattaagactgagtaccatcttttactcccttccctcttcccaaaaccccacccatggcaggtgcagtctcagcttgttgcgcttactataatttttggtttttaattctgggctctgggaattccccttacagattttgctatgcattttaaagaatgttggttatattttcttcaacatttctaggcatttaagatgtgtatgtaggtgtcatggattatctggtctggcatgatgctagaagggcagttctcattagaagtactaatttaacctgagaatgatgtctcttgttcgacaaccacataagtctctagatttgccctttctgagacttcgcatcatgtaaattacataaatctggtgtttgactggatgctggatgccctggtggagtggcagcacctgcagagatctgcatgtgtgtttttcttggttcagagctattttgaacatagggtaccaaaagactgtctttagaaccctgagatttttgtatatttcaacttaaaatttaagaacatttatgaacataatattaatcaataatattcacatcttattgccgtttacataacacttttattaaacagttttagtagttataaaactgatttgcacttaattattttcgtagttataaaactgatttgcacttaattattttcagttgaagtgttttacaaatgatatggtcatgtttcacaattacatgtaagcagcatacagtggtgatctagctatcacagggcaaaggtaggatgcactaatattacgttttaaaaataaaatttaagaaggaaaaggtttctaaattacagctaattgtaactagtaatataactaaaatagtaaattgtaactactataattatactaatatagttctatgaactgggcatgttatttatataaatgccttagtttatgttttaaaactgtgttataggccgggtatgttggcttacacctgtaatcctagcactttgggaggccaaggcaggcggatgacttgaggtcaggagttcaagaccagcctggccaacatggcaaaaccctgtctctactaaaaatacaaaaattagctgggtgtggtggcgggcacctctaatcccagctacttgggaggctgaggcaggacaatcgcttgaacccgggaggtggaggttgcagtgagcaaagatcacgccactgcactccagcctgggcaacagagcgaaactctatctcaaaaaaaaaaaaaaagaaaaaaaaactgttatagaataatatttattttctttgtattagtactctcatgctttttggtgtttgaatattataaatgtacaaaatccttaaaataactggaatctaacaaaagttttctttgaaattttttagaagtcagagtcagtttctccccatgaacattcctgtagttgtatcaaaagtaaattcagtccctaaaacatttgttaaataacaggactctttataagaagcagaatgtcatggttttgctgttgatgtttatttctctgtgcccaaaatgacaaattctaaaatgatgatctctgttgattaatctcatgtgcccaagaaaaaaatcaagtgtatgttaaccaatagcctgggctattttgtctgataaaataggcaattttattagacaaaaattgtctatagatactgttaataaacactttgtctaacaaaatataactttacattttcttgtaggttaccttccgaacaagaatctatcactgtaatattaacagccaaggtgtgatctgtctggacatcttaaaggacaactggagtccggctttaactatttctaaagttctcctctccatctgctcacttcttacagattgcaaccctggtaagagactttaaatctagtatgaattggagcttgtcaagatttaaatgtcagacccttagtaacttgtttactactgctactaccactaccaccactgcttctactactattattgttaaattttcatagtatgtaactattttctttttaaattgggtcttctcattagtgtttttaagacctatcatttgccaaaaaggaaaaagtatagtgtggtaaaaaaaataatgaaaaatcattttagatgggaaagtacgtttaaagaatgaattaagttatcctgccaaataataataaaaattcaagttgaatagcttaatctttaattagatgcctactagaagatgttaatttgaggaatgtgggctattaaaatctgataacaaccaggcagcaccatgcagacgtgacctttttggcatcctagtaactgtgcatcctgacaagctattataacggtcctgaatggtctgttctaggaaataccccaaaagtaaacaaggaaatacacctcccaagaaaacgaaaaagtctatagccaggcctttatggcttgctggtgtgcttaccactgaaaattcttaattcctgggccatgtctttacaaattgggtttattttagaaaatacaaaaatccaaagatagctatagggttttcattgatgttctcagtgggagaattattttatgagtaattaatagcttaaatattgcatgagattccctcttctacaatcatgagtaaactctgttcactggatacatgaaattttacacaaatggaaatgacgagtatcagtggggttgcttaggatcctggctgttttataaaacatcaagaaataacagtctttctacttttatatttctttatttttcagcagtaaaatcttttttaaagtagcaaattagtattttttttttttttttttttttgaaactgagtctcactgtgtcacccaggctggagtgcagtggcacgatcttggctcccgcaacctccgcctcctggattcaagcgattctcctatcttagccccccaagtagctgggattacagccgtgtgccgccaagcccagcttatttttgtacttttagtagagacggggtttcaccgtgttggccagccaggtctcgaactcctgaccttgtgatccgcccgctttggccccccaaagtgctgggattacaggcatgagccactgtacccagcctgcccaaaaaataaaattgtgcaggatcattataaaatattttttgaattaattcatactttactacagacagtaaagtccaataatgttatactaatttaaagttaattttgttctttcagtcctgttgttcccattttaatcccatttgtctgtgactgtgtataaccttgtataacctcatttggaggtaatgttgcaagaaggctttttttttttttttttttttgaggtgatttcgaagcctggcctgctttgcctccaagtcagctgaaatggaatctgttaccctgaataagcctgtatatgacagcctgttctctctacagatattcctgcttaaaggaatagattcattccaccaaagccttctctcagcaatcaaaaagacttctgttcagtgaactagttttttttttttgctccgtttcagaaaattacaaatgcattctgcaaaaacttaaaaatcactcctaactaaagcagaaccacataagtaaaagaaatagattttgaaataatgctattgatagtaagaacaagcctaaaaataatgttccataaaaccaaagacagcctgcctcatatgagactagaagagaatttgtaaaatacatgctaacatttagtttatcacactttttaacacataaaaataaagtttcctaattggtttttatgaatgttgacacttctagaatcttaaatagagttgtttattttaaagtagtcaaatgtccattcttttgcttaatggacttatttcacactgttatctggtacactttcaatctctgtaggtttttttacctacagaggtaggaaagattaggttagattgaagtttatcttaaatctatcttcaaattatcacaaaaacaagtttgatagaataggaataaataagattttcctacactgaatctgtagagctattttaacccggaaatgctgtcacctcaaaaataggccttgtataatgatacaaatttaactcacttaaaaaatactttctcactcttatccatacataaacttattttctaaatctttttcatactctttttgtaatttgcacttgtctctttaaagaatttttggtccattccaacacagatgttctttagggtatgactacccatccttatcagcatgatatttgtagacagcagatgtagatttgaaaaccagtttaattgtttattagtcatatcacattggatgggtcacttaactttccacaggcttagtttttgatataaaattgggattagtaccagccctgcctaaatcactggattcctctgaggttaaaatgagatggtatatgtgaaagccatttataaatggtaatgtgttgttgatattgttacccagagtatttgggacaccaaatgggcccacaataggtgaccgataaacacctactcagttgaatttaactggggagatagtatcgaatagtatctaacgccgtcacctcaacattgacacttggattttacaatcgaaaaaagctgaaccttgacttagtaggattatcactcaggtggcagatgtccaaacgttatcagccagtcgatgggtgcaccagcaataatcattctgttttcaatgcaattgtctaggtagatctaactgctggtcttattaggccaccacttcatgatggtgtttattgagcctgatagagcattctttttttttttttttttttttttgagatggagtctcgctctgtcgcccaggctggattgcaatggcacgatctcagctcactgcatcctctcctcccgggttcaagcgattctcctgcctcagcctcccgagtagctgggtctacaggccccaccaccatgcctggctaattttttgtatttttagtagagacaaggcttcaccgtgttagccaggatggtctcaatctcctgacctcgtgatccgcccgcctcggcctcccaaagtgctgggatgacaggcgtgagccacccaaccagccaagcattcttatttgttagacgttacctggctttttctgagtttagtcttgcttactaaacattatttaatttgtgaattgccaaagttgagaataccattggggaatcaaatttctgtgctttcttatttgtaagtactttcttctggagtcattatttaacacataaaatttaagttctatttggtttcatcttttgaagtttgtttttgctattttgtggactttttaaaaactcttagatgtttggtaatattctttatatgaaatctgtttctttaacaattatttaaaatgtgcttatattatggccttcagacctatttaaaaaatgggtattttacctcatgcaaaattaatcattgtgagaacactgacaattagaagatcaacagttttcctttacctgatgcttagtttacagagttatggctataaatatttctaacctttttttccttcttgagacgtgtataggtctgtatatcatctagcattattttattaatctcatttctatttgtctgctctactactgttactctctaaagtgtttttgagcttgttttgttctaaactcagttatgatgtatcatttaaaattttcccccaaatatgtatgactcttatgagacagtcagaaagttgacaatgaaacatttgatattgagaaattattgccagaaatttttgagcatgacaatggaattgtacctgtccttaccttttagacatctgtactggactatttgcaaataaaattctttgatatatggaatttagttcaaaataatccagaaagattgtagatggggaggaatatggaagatactgagattgaccattataactgttgaatctgagtgatgagtatacacatgggtgctcattatacttttctatgtttggatatgtttgaaattcttcttaactttttttagttgctaaaaatcagacatactaacagtgtgacataagtcctcgtttaatgtcatcagtaggttcttagaaactgcaacttttagtgaaacgagataatgtataatgaaaccaattttaccataggctgattgatctaaacaagggttaatttcccgtggcatacagtacttcattttgcttgaagttgcagtttccaagaacctatcagccacattaagtgaggacttaaggtaatctgtaagtggtacgtgatttggctctcttttgctcttgaagggaatcatctgggctctgaccctggcttgtgtatttcattcccctgtcgtctgccttcagaccataagctgccttgtggtgcagcctggaccagcaggggcttgcattcgtaagcaaccatgaagtctttgtctgtctctcttcaaacaggcagaactatacaggtcaggtcaaatgaaaatgctctaagcatacccacaaacatcaacactcaggatggatgagctgctccctctccctgcatcacctttcaaataaaaatcaagtatcggttactccagtcttagatgtgtgcagatctgtattagaacagcaaatagagctaagaatggccactaattaaccctcagccttgtatagtgattaagctgagggtgagcacagctgcagtttcattggtaaaagctttattcttctcaaatggactgagcaaaagaaaagaggaatttgctcccagtggctcttttatagtgatctataaaagcttgggagaatgtttccttcttcattctccaacatcacaattttttgtttcagatcacttaaggccctttttttaagcaatgaaaacaattcttattcataaattgtctctgataccttagctttgattgttattaattgcttatctttggattagttatgattaggtagtaaattgtgttagtaaatattaaaattttacaattgatagtgactgctggtgggtgggaaccattaagtcagattaattatttcagcacatttatatttgtgtagattatttataccaagtttgggagccgctagactgatgaaaggtacatataacacctcagtaggattctagtgcttacacaatagtgtgaaccttgctgctgcatgtctcattctactatacttgagaactgaaaaagaacaatttctttaactgaaattcaggtaaaatggtaagtctacctgttttcaaagcagactgttttagcaggactacaaaaaaaaaattttttttcctagaacaataactacagttggctacctagataccagatttcttctgatgcctatggcttttttaaagtgaaaaatattaagtagaaatacgtggcacaacatatagctaacttcagactgttttcttgtgaaaagttggcttgtcttctgtcaacttctgtctacctgctaaattctaaaagtcactctaatcaatacttccaaatatggatgtggagagactccacattattgtcatttaacttcactggcacctcatacaaagaaaaggaaagctatggttatagagttcatactttgctcctgttgtttaagtaaatattaaataagtgctattaatcaatctacctggtatttttaatagcaagacagtaaacaaagttcaaaacgtttattaaagcctttgggttccaattcagtattacctgtagaatcctgggacaccgtccccttccctcccctaagtttcccataggcttactcagatgcatttgaaaataatgctattcataatgttgaggttctagaaaaattgaaggcttattaagatggatgaataaaatcagggaatatacgttccctgttttgtgaattaaagaagatatacagaagtgattgtgtaccatcataaatttggtttaaaaaaacaaaaaataacaattctgagatgcttaccttgacccctacatatttgtaaatgcaaattttaaatgatattaaaaggattatttccctactttgtcaattctgtaaaaataaaccatttctttagttgtcttacaagagatactggtgtataataatgcaaacaaaaatatccattagtttgtagcacttttaccaaagaatgattttctaggaaatactgaatgagaaaggaaagccaaaattaccccattgtaggcttagatcttggattccctagttgtgaaacaagtcaaaaggattcatcctctttgactcaaagagttaccaagaaaggattggtagcttcaggtgagggatgacttcatgacaaagcaaggatttcctatttagcccatggtatttctgctttgtgtgggcaagtctttatttataaccaacaatttgatatcctcctcaaacatccaatttgccttggtgaaaaggagcattaactgtttattcttttttgatagattcttactagaaatgctgacctgctaaaactttgttactttcataacttaaatatacgtcctttgataggtttgattcttttaaagatggttaaaactagactttaccatatttgctaacatatgggataccttaaaaagtgcttttaaagtttaaagtttcacccttatctcttatctaactaaaagggcctttggagaaattacttccatttggtaaataagaaaatacagtgttgtgtttatcatcttcatgtatcttttccttacttctgtttccttacttctaacgcagggagtatctgtcaactttacttgacctataaagtgctaccagcatttttaaagtaggaaggtaaatcccttagagtgggaatctgtggttccttttctgtttctttttgactgttacagagttgttcacgcatccatttcaggtttctgattggtgtgttctgtaatagcaggtacagtaaaatcttactagttcagtataattgagaaaagatcagactgattttttttaatgaattggaaattttcactaagtgaagacgtaataattttaagtacatataggaaatattaggtaaaatgtgtgaactagatggcctctagactctcctttaccaaggaaaaggctgaagtgggtttttcacacattcacaaaaaatagagaaaatggttattataagtcccagtgtgtccctcacccagcttcagaactcacctatatttagtaaggtttaggaattagggttttttgtttattatttatttatttatttttagagatggggtcttgctctgtctcccaggctggagggcagtggtgtcgtcatagctctctgcagcttcgaactcctgcactcaagcaaccctcctgcttcagcctcccgagtagctaaatattctcagataatattgttttaataccattaattttcatgaaaaccatttttaaacaagacctagtaaatgtcagaacaggttgctgcatcagaattaagttagcagtggtgaacttaagggtatgttactaaaagatacagcatgtgccctgtggaagataagccactgagtaaagtttgatgcccttttgtttgtttgtttgtttgtttgtttgtttgttttgagacagtttcactctgtctcccaggctgcagtgcaatggtgcgatctcagctcactgcaacttccacttgctgggttcaagcaattctcctgccttagcctcctgagtagctgagattacaggcgcgcaccaccacgcccagctaatttttggatttttagtagagacggggtttcaccatgttgatcaggctggtctcaaactcctgacctcgtgatcctcctgccttggcctcccgaagtgctaggattacaggcatgagccaccgtgcctggcagactgacacctttttaaaaaaatagagagagagatgaaacctcattctgttgcctatgctggactgtagtggcacaatcagaactcactgcagccccctaccggaactcctgggctcaagtggtctcaagtgatcctcctgcctcaacctcccaagagctgggactataggcacatgccaccatacccagctagtttaaatgtgaaatcaggctttttaaatgtgaaatttttaaacatgaaattaagagaaattatttaaacagcatgtttaaacaatacatatttgaaattaaaataatgcattgttagtgttatggaaattccaatctgaaacagcataataaaacaactctaattattcagtaattgacttgtgtggacaaaacatccagatgattgaatgacattttctctttttactgtgaatacttaagattgtacagtatcttgggagaaatgttgtaattatgaaaatttgaagaattaatgtaacactaccaatgtctgagtcagatcccataacaaatgggcagttctctttattttacttattttctgactcaacttttcattcagtatctagcctgggcaaggtgctatcagtaacaacactcacagtgcctcttcctcagaaaagaaagcgcttccaaaatgtcagattaattattcctatacaactgtaataactactttctctttttcttctcttcatatttgttctttagtagatcctggagcttaatgtgtattatggctgttgaatttttcatgtcatattggtgaataattcacacaataagcagtacaagagtttgcctaaattactagcatatttctttctggagcaggtctgttcctggaaaaaattacaaatcagaatattttacatgtattggaagaactttctgcttaagagtatcctacagggaaacctgttgccacatgaagcttttataaagttgaatttttggaaaatgcaatggttcttccccaccaccgccccaattcagcactgtcttccttctgaaagcattttcccaaataagacatattgtttgtgctattcaagtgcctcggccaaccaacaaatgcctatctgactatgtgcctataggctgatgtagttagtaccttttgacgtgactctttacaccagtgaggtaaaccaccttccttgcatacattgtgaccacatgtgtactccagtgactttcttgtccagactggctggctcctgtgatggaaaaaatgttcatacacagactaatttaaatacataagggaaactaggaagagtgcaggcctagagaagatgtcttcatagtttatctagctttggatgccagcattatatttttataagaaaaactctagaaaagagttcagcttacaatgcatgaataaccccgcatcactggggcaaaggcatattagagtgccagccacccgtggtcatcgtaggagggtacatttatctgagggatgtgtattttttaatcttggtaatagcctactagggatggtatattttaacttcagccttactataaatggttctgtatctgcgggtaatgcatcttttctgtagattcataatcaaaataatgtggttagcttagagttggggttaatcatatatgagttcaaaaagttaatagtccatgtccaatttggtaaaagtttgtaagtgaaaaattactatttgggggaagtttttgtttgcttctttgatttgctggagaaatgatttaaagttgcagtattgtaactaggcaaagaagcctttgatttagatacatgtgggagttgcatttggggaacttaggccatgtgtatcttcatagtattcatggtggagagagagtgttttcaggtgaaaaagaaagttttagattcattccttaataaaatgtattttctgtattggctttttgttattttcaaaattgatgtatctttattattttttcttatacaaataatacctgcttattaatttttaaaaatcagtcgtcttttcaagataagtatttaatttttatttgaggctctttgctctgggaactcaaatttggtgggacccagcaaagtatatttgtcagttaagtttgtctggttataatcttggtgtaaatttagacacgttgacctcagggatttagccttggctttgacctgcttttgcttagcatttccctatgcatattttattgtctcttaattaatataaatgtcgacatggattagctgttgatacaaattttcttttataaagtccattgctctccctgcagtagtaacctctaattggttggtttagaagttgatcttggctaggtggctcatgcctgtaatcccagcacttttgggaggccaaggcaggaggatcacttgaagccaggagttcaagactagcctaggcaacaaagtgagaccctgtcgctacaaaacataacaaacacttttaccacttctattcaacatagtaccagaagtcctagccagaacaatcattcaagagaaagaaataaagggcatccaaactggaaaagaggaagtcaaattatctctgtttgccagtgatgtgatcgtatacctagaaaaccctaaagactcctccagaatactcctagatttgataaatgaaatcagtaaagtctcaggttacaaaatcagtgtacacaaatcagtagcattgctgtatatcagcaacagccaagctgagaatcaaatcatgaactcatttcctcttacaatagctgcaaaaataaaataaaatgcctgggaatatagttaaccaaggaggtgaaggatgtctgtgaggaatactacaaaacactgctaaaaaaaaaaaaataataatagatgacaaacaaatggaaatacatttcatgttcatggattggaagagtcaatattgtgaaaatgaccatactgcccaaagcaatctacagattcagtgcaattcctatcaaaacaccaaaatcctttttcacagaattagagaagacagtcctaaaattcatatggaacaaaaaaagagcccgaatatccaaagcaatcctaagcaaaaagaacaaagctagaggcattatgttacttgatttcaaattatactacaagtctgtggtaaccaacagcatggtattgttataaaagtagatacataaaccaatggaacagaatattgaacccagaaataaagccaaatacagccaactgatcttcagcaaggcaaacaaaaacataaagtggggaaaggacaccctattcaacaaatggtgctgggataattggcaagccacatgtagaagaatgaaacttgattcctgtctcttaccatatacaaaaatcaacttaagatggattaaagacttacattgaagactaaaccataaaaattctggaagaaaacctaggaaaaactcttttgggcgttggtctaagcaaagaatttatgagtaagaccccgaaagcaaatgcagcaaaaacaaaaataaatgggacccaattaaactaaaaaacttctgcacagtgaaagaaataatcctcagagtaaacagacaacccacagaatgggaagaaatatttgcatactatgcatctgacagaggactgatatccagaatctacaaggaactcaaatcagcaagaaaaaaacagtcccatcaaaaagtggacaaatgacatgaatagacatttctcaaaagaagatatacaaacggccaagaaacatatgtaaaactgctcaacattactaataaccagggaaatgcaaattcaagctacaatgaaattcacctcagccctgccagaatagccattacttacaagttaaaaacagtagatattggtgtggatgtggtgtgaagggaatgcttgtacactgctggtgggaatgtaaattagtacaagctgtgtggactatggagatttctcaaagaactacaagtagatctgaaggggtgggttgcccctccacacctgtgggtgtttctcgttaggtggaacaagagacttggaaaagaaaaagacacagagacaaagtatagagaaagaaataaggggacccagggaaccagcgttcagcatatggaggatcccgccagcctctgagttcccttagtatttattgatcatttgtgggtgtttctccgagagggggatgtgtcagggtcacaagacaatagtggggagagggtcagcagacaaacacgtgaacaaaggtctttgcatcatagacaaggtaaagaatcaagtgctgtgcttttagatatgcatacacataaacatctcaatgctttacaaagcagtattgctgcccgcatgtcccacctccagccctaaggcggtttttccctatctcagtagatggaacttacaatcgagttttataccgagacattccattgcccagggacgggcaggagacagatgccttcctcttgtctcaactgcaagaggcatgccttcctcttatactaatcctcctcagcacagaccctttacgggtgtcgggctgggggagggtcaggtctttcccttcccacgaggccatatttcagactgtcacatggagagaaaccttggacaatacctggctttcctaggcagaggtccctgtggccttccgcagtgtttgtgtccctgggtacttgagattagggagtggtgatgactcttaaggagcatgctgccttcaagcatctgtttaacaaagcacatcttgcacaacacttaatccatttaaccctgagtttgacacagcacatgtttcagagagcatggggttgggggtaagatcatagattaacagaatctcaaggcagaagaattttttagtacagaacaaaatggagtctcctatgtctacttctttctacacagacacagtaacaatctgatctttcttttccccacaagatctaccattcaatccaacaatcctactactgggtatctacccaaaggaaaataagtcatttatatcaaaaagacacctgcacatatatgtttatcacagcgcaattgacaatcgcaaagatatggaaccaatctaagtgcccgtcaaccgatgagtggttaaagaaaatgtgatatgtatacaccatggaatactactcagccataaaaaagaaggaaataacatctacggcaacttggatagagctggaagcctttattctaagtgaagtaactcaggaattgaaaaccaaataccttaagttctcacttataaagctaagctatgggcacacaaaggcatacaaagtgatatggataattggagactcagaagagaggaggtggggcagttggtgagggataaaaaactatatattgggtaaagtgtgcactactcacgtgtaggtatactaaaatctcagactttaccactatacagtttatccatgtaaccagaaaccacttgtatccctaacactattgaaataaaattaattaaacatttttaaaaatttttcaaagaacttgatctgattgaaaagtcactgtatcttatgaaaattctcttcagtttatgtttagaagacttcattttggagttacccttaaaaattaccagtgacctatttttgttgtcattgttcttgttgtttagagaaacaaatatttcacttaaacaaacatcattctttactcacatgtcttttactcagaactatttgcccaagaaatgattcagagtttctttgtttcccttacttgaggaatttctgaagtcaagaacatttagatttttttttttttttttttttttttttttggattcggagttttactcttgttgcccaggctggagtgcaatggtgcgatctcagctcaccacaacccccacctcccaggttcaaacaattctcttgcctcagcctcccgagtagctgaaattacaggcatgcaccaccacgcctggctaattttgtatttttagtagaggtggggtttctccatgttggtcaggctggtctcaaactcccaacctcaggtgatccgcccacctcagcctcccaaattgctgggattacaggcatgagccaccgcgcccggcaagaacatttagattttaattaatttttaaaaattatcttttaatgaagataatgaaaagataaagattatagtggtgaaaacagatgattaattctctccactctagagtaaaaataacttttctctaatgacagggagagaattatgtattagtatatatgccagttatacatgcttttttcccatagttttatccgtgcttttttgatgacttggattattctgtttctgttagagttattttattgagcatacatattttattgcaaattgactcttgtttggcaaagtgaggtgtataaataagaaattaagtttttttgcttatggtaggatcaaggagcacattttgtaactaccctgctcactatttgggtttatttacagcttctctcaagagaggaataactgtgtcaggctttgctaagcaatctcgttccaacaataagacatttttttctgtgtctgttgtccagctgtttagtaggttcttggtctccacactaacagaaaggtttcaggtgttactcccaggcagggatttaccacaggtgtgtgtcttttccaccatttaaaatacccagaaatgatgagattattaagtagctgactatggtctgtatacttctcttagttcttcaccagttgctgcttttgaaattcttaagtgctatttctttattggttcatttgttttgctatttagatttatttccccattcagtctacatttataatgtggtggtctgttaatacagtaagcttgttattggtaaatggagtcattctagtgaaatttattgtcagaaacacctgtacctgatttataactaatgcagcatggattttactttatgcaaattaaacaaatgtgttttaaaatttgataacagcataaaacaccctcgaggatgttgattgctcaccctaactcagaaggctctcaaagctgatacttctcttcctaaataggagacattcttttctcagtagagatccccatgtggctgtcacattcttttttcaggtcatctttcagaatgtactaccttctgagacctctgatactacccacccagccctaaggaggtcccagtgaggtgatcacattgacttttaaaaaacttttatgcccagaggatttgttaaggaagctattcccatactttgaagtagctgatgtcctcagggacctggtgtgaataccggagggaagactggagggaagagtgatactcttaaggttagcattagactctctcctctgcctgcctgcagagaaatagccaaatcagtgtgaactactggcttttatatacatatgttctcacatcagcttactcatgactgccttctaaagactgcctctttcaggaatcctaatagaaaaagcaactaagagaaagaaaatgaatcacgtcagaggttacagaaattataacctacaccatctttcacaactagaacatcatataaagctgtttcattatttttcttactccttttacacatttttcttactcctctttgtcttgttcctatcagcccagggactctgttgcattttgctttactttctggtgtttgtaatataaaaacaatttatctattgtacatgttttccatttccagtacatacacatgcacaaaccccaccttcacctcaggctttgatttgactccaccttcaagctggaagcctaaccctctatgggagtcactaagatggagccaatggcaaactgaagtggaccagcacttacttacttctttaagacagaactttgcggtgtattcttggttgttccttctctctaatcccttttcccgttagctggtctcttctctctgcatttccagcctcctgatttttctgctgctgtttctcttctcttttcttatccttatggttcacgtgctgctctcctccttaacttcatttaaccttgcttgcactcagtaaaatatttaaaaacaaacagaaggacttccaagccatattttttattttttaagagtagctttatttattattatctctataaccatatgactcagcctgtactgtctgttagaccaatatataatcttggaatatcccttttcacttcatgtgccaagttggtggctcctgttcttctggtatgccagggcaagaatggccccatcagctctcaaaagaggtacatagtagcaactctgaaaatgtggctgaacactgtgagtaatgttgtagttcttgccagtctcagccagtacctaccttcttaataaatggcctctttccccagctaaactgtttctttttttaacctactttggaaaatatattaaagtcctatactttgtaagcagcactgccaaagcagtatcatgcacatagcataataatctcattttgatgttctaaagttctttctttgtcctttgtaatggatggcaaggttttaaatgaaaacactggagttgctccatagcatgagatggttttttattgttttgctctaagctgttgccctgatctctactacatttatgcctgatttctctaagtcatagtgacatgcccttgcatgcatcttttcagcaaaccttatgatgcctattgctagacttatcagtgtcaggtcatgagaacaatgcaaggttataccttgccatgttaaagaaaattaagtcaaaggacctaagttatactgagttttgaagctgtcaagaaagccagagccttggcccagctctctcactaactagctagtgaccttggataaatcggtgccctcatttgtgaattaaagattgtacttctgaccctatcttgcagcattattgtgaggaaaaaatggtatgtgtggacctctgtaaacactttgaaggctatgagtatcattacgtggaatgttattgaactgaaagtccatattagctgtgttaggtgtgatgacctcgcctttgagatgtctaaaaaaggaatttcaaccgggcgcggtggctcacacctgtaatcccggcactttggaaggctgaggtgggtggatcacctgaggtcaggagtttgagaccagcctggccaacatggtgaaaccctgtgtcttctaaaaatacactaattagctgagcgtggtgggaggtactggtaatcccagctactcaggaggctaaggcaggagaatcgcttaaacctaggaggcgcaggctgtagtaagacgagatcgcaccattgcactccagcctgggtaacagagagagactccatctcaaaaaaaaaaaaaaagcaatttcattctcagcataaaatctttagataactcctttatagtttgttaagtttggagtttcaaatgtggtggaatttactttctataaaaaaactagtaggaagaatgaattataactcaaacttgatttaatgattttaatttgctttaggctcctatttttataatctagataactattgaggattatcttctgtcatctataaaatgaattatgagtctgcctctttattcccagcacctataatgtacaaactgtattcccctatgcaaccccatgtggccaaagggctccccgtgaaattgccttatttcaagcccaagcctcttttaaccttgactgctatccccactgttcctttgcttttactctgtataaatctcaggcataagagacaacttaaaatatgtcaggatattatattagataacaaaactcctagaggtcaaagactatgttgtccagagagttttgttatcgcaaactcctggaggtcagagactatgtctagttaagatgggagtgaaactcaactttttcacttctgcttctggccatgaagaataacaggagccagatttacactcctaccttagactacctttctagttagaaaactagacattccctgagaggagaaacagatgaagtaagccctacaattgtccccagcttactgcctagaagcagtttccaggatactgtacaaggagaaagaaaccaaagagagaggccagcagtgtcactgagttgaggagacagagataggagtttgggaagatcaagatggctagcatttgtggggcagaaacccagagaagagggattgtacagagagaatgccctagaaatctgaagagagatccccttgagcctttggttaagtttgcatataatcatcaaaagatcctgccttattagtagggatgaattactctaaagactacattgcatctgctctaacagtttaaaagcaagttttgaaagtatcatactgttcctaaataacttaactccctgttagagtaaaatgcaacattctttggaataaggtacaacattctttatggaaatacaacaaattccaacactcaacaacataaaaattgcagtgttcaacattccataaaatattaccacggacttaaaaggcaagaaaagagaattcataaccagttgaaaaataaataaaaatggaaaagactaaaacatttttgtttataaaagggcaaccttttaagttaattactaaagcattataactttggtaagtattctcaaattgatttagttcttaacttcatgaaatgtgaatgctttaagaattgaccagcatgtcttttgcttagttaaaaccagaatattaaactgaagagaaacttatgttggctctatattagtagaaacatgcaaacagctatactattcaaacttgctagtaacttggggctactatcattactgttactgtaggacttacatggctggccatttacaatctaaagaaatgtgagtgggaagtaagagaatcacagaaacaatatgttgcctcattggatctttgagaaggtgtggttagaaagaatgggggcagctggaagaggattatcctggagtagaggacaaagaaatgtggggatgagagagtaaaaaggatgactgactagagggccttgcatggtgggagatgacgatagggatgtaaagcatggtttgctgtagctggtcccaggctcggctagggcctcgtataagggtgtgtgctacggactgaactgtgttctccccaaaattaatatgttgaagccctaactcctaatgtgactatatttggagatagggcttataaagaggtaatcaaagttaaactaggtcataagggtggaaccctgatccaatgggattcatgtccctttaaggagagacaccagagaactctgtctttctgccttgtgaggacacatccagaaggcagccatctataagcccccaagagtcctcgtcagaaaccacatcagccagcaccatgatctttgagttcccagcctccagaactgagagaaataaatttctgctttttaagccacccagtctatggtttgttgtatggccacccgggcagactaatacaggtgtattaaagttttagtcagcagccaggcttggtggcacccccctgtagtcctagctactcggaggccaaggtagaaagatcactggagcccaggggttcgaggttgcactgggccaagatcaggacactgcactccagcctaagcaacagagagagaccccttctctaaaaaataaagtttcagtcagaatgtcaataaaaatattctgcatcatgtaccaattcccaggggactgagggtgttgagtagatctggatttcatgataagcgcctgtttaactaaactaatgggttgcttttcatctaggcacaaggtaaagaaagcataaacaaggacagtcaccaaggagaggttttgggttttaacatttctacagttccaagaaataaataggagttagcacaaaaggaggtgtacgtttgtttctgcattcccactctacagttgattgtctttgtacaatcagcttctttacaaattgtactttggaacttttaagaatgtaaggttttgtggcatttctgttagctgacctcagttctccatcagttgttgccacatgaatgcaagtacattctgaaatgctattcaactaccattcaaggctttgaacaggcagctattgccataactcattcagaaaaacacctcaagattaactaaaattgtctttattccatgctgttttcaatccagtctaaaaactaccaacatgtgtatagcaaaattaattttgcaaaatgtacgaatagtattttctatgtaaatttttttatgttaagaaaaaagtattttactttctaagttttgataaaccctttcttattgatttttaatctccttgattatatccaccctggagttttatggataaaagttgaagatgattgtaggagaaaaatgagagagaaatagaaattttctcttttgtgttaatggtaaagttagcctacttacctaaagataaaattaataaattacttgacagattttcattgttaatatagcccaaaatgctctatatttcccttttatagtatgatagaaacctttggtcacactttaataaaacaaaatgctatattaagaatcattgatattacattataaactttatgacctctaaaaaaaaaaataatttcaaagaagcataacttgtgagcatgtggtaaagcggcatcccactgaagatcagtgttactgcttttaatctcttttaagttaatacttcagtatactggtagctataactatagggcctttgttttggtcgatgatatttaacctaccatttatgttaataaactgacattgctcttaaagtaggttgtacattaaccacccaaaattggacatctgttgctgaaggaaatggtttcattttctgaatgcctctgttccctttatagtcattttttccattattgacaatagttatttgcatttttgtagacatgaggaggctttctcaaaagccgtatccatctaataaataaattcagtaaagttacaggatataaaatttaaaatctagatagaaaagtccatggcatttctgtacacaagtgacaacctagccaagaaaagaaatcaaaacaatcccatttatgatagcatttaaaaattaaaatacttaggaataaatttaaccaaggagataaaagacctgtacactagaaaatgataaaacattgatgaaagaaattgaagaagacacaaatagaaagatatttcatgctcatggactggaagaattaatattgttaaaatgcccatactaccaaaagcaatatgcagatccaacacagtcactatcaaaatcccaagggcattgttcacataaatttaaaaaaaaaatcctaaaacttaccaaagaccctaaatagccagagcaatcctgaggtggggttgaggggggaagagatatcacacttcctaattttaaattttatttcaaagctatagtatatagctatagtaatcaaaacagtgcagtactggcacaaaaacagacacatagaccattggtacagaataaagatttcagatataaatccaaacatatatgggcaactaattttcaaaaagggtaccaagaagacacaatggggagaggatagtctcttcaaataaatgattccggggaaactggattgccacatgtaaaagaatgaaattgagccaggcacagtggctcatgcctgtagcctaagctacttgggtggctaaggcaggaggatcacttgagcccaggagttagaggtcacagtgagctatgatcacactgcattccagactgggtgacagagcaagaccctctctctttaaaaaaataaaataagaatgaaattggacctttatcttacactatacacgaaaatcaactcaagatagataaaagacctgaatgtaacacctgaagccataaaactcctcgaagaaaacgtgggtaaaagctccttgacattagccttggcaatgatttcttgaacatcacaccaaaagctcaggctacaaaagcaaaaataaataaatgtaactacatcaaactgcaaaacttctccacagcaaaagaaacaacaaaatggaaaaggacaactacagactgggaaaaaaatatttacaagctgtatatctgataaggggttaatacccaaaatttatttttaaaaaaactcatacagttcagtagcaagaaaacatataatccactggacctgaatataccttttttttttttctttttgagatggagtatggctctgttgcccaggctggagtacagtgatgtgatctctgctcactgcagccttatctcctgggttcaagtgatgctgctgcctcagcctcctgagtagctggtactacaggtgcctgccaccacgcccgtctaattttttgtatttttggtagagataggatttcaccatgttggccagtctggtcttgaactcccgacctcatgtgatccacccgcctcggcctcaaagtgctgggattacaggcatgagccaccatgcccagcctggtcctgaatagacatttatccaaagatgacattaaaatggccaataagtatatgaaaaggtgttcagcatcactaatcatcagggaaatacaaatcaaaaccactatgagatatcacctcgcacctattaggatggctgttaccaaagagacgaggttaagtgttggcaaaggtgtggagaaaagggaaacctcgtatactcttagtggaaacatagattggtacagccctgagggaaaacagtatggaggttcctaaagaaataaaaaatggacccatcattccctctgctggatatatacccaaaggaaatgaaataccacctcatatagatacctgcactctcgtgttcattacagtattcttcacagtagccaaaatatggggaaaaacctaggtgtccatcagtggacaaatagataaactgtggtgtatacatacatacatacataaacacacgcacatacacagagcagaatattattcagcctttaaaaaggagatcctgccatttactgaaacatggaaggacattatgctgagtgaaataagccagacacagaaaactattgcatctcatttatatgtggaatttttctttttaaaggtcaactatataaagatagcaaataaaacaggagttaccaaggttgtagtgtggggaaggaactggaaagatgtaggtcaaaggatataaagtaacaagtagaaaggtctcgtgtgcaacataaggactatagttaataatagtgtcttcaggatttttttctaaatgagtagattatagctgtcttgccatgggggtggggagggaaatgggtaaaagtgttaggtgatgggtatgttaatttgtttcactgtagtaaccatttttctatatattgtatcttttaacaacgtgttgtataccttaaatatacaaactttttttttttttttttttttttgagatggagtcttgctcttttgccagactggagtgcagtggtgcgatctcagctcactgcaacctccacctcccaggttcaagcgattcttctgcctcaagctcctgagtagctgggactacaggcgtgtgccactgtgcccagctaatttttgtatttttagtagagacggtttcaccatgttggccaggatggtctcaatctcttgacctcatgatccacccgcctcgacctcccaaagtgctgggattacaggcgtgagccaccatgcccagccaataaaatttatttaaaaaaaaaaaaaaaaaagctatactgaacaagatagggccacctcaaaagtaaacgtgaaaagaaagattagaatcattgataaggcattggtattaaaaaccagcttatcctagatttaagatgaaagcggtattgtggacatttgttaagtcctccaaaaccactaatagcttatttgaggttaaagagtcctcccttaaaatatgtactacaaacttatggtttagaatttcactgttttgcctcacacatgactttacaatgtgtaaatcaggaatccagcatttcttcccgtataccaacaaaatttatattttaaattaactcataataatctatataattttaaagcaaatgctgacattctgtgacccataaatagcacacatggaattggtatgtcctgtagaattattgctttctttacctatccgtaatgtacagtaagtcctcatttaacattgtcagtaggttcttataatgagaccagttttaccataggctaattgatctaaacaattgccaagtcccttcggcacatttctcatcacagacatatcaccaaactcctaaaggaagacctaaaacactcctaatactaaacattgaaatagatgtgagctatccatacatttaagaaacactaaatacaagtaagataattatttatccaattttagggaaatcagtgaatgacggtgtttgtgttggtggtggactaaatcaaataagtttttgcaaagcaaaaattgtgaggagcacctcctacaaccatgcagttcagatgctaaccaatatggcaggctcattgaatgctttcatactacatcatttactgttgcgcattttgtatgattatcatagactaagcacttctattttacaatcctttgtattcattcattcattttccagcttgtttattccagtttaggatctcagtcagctagaacccatcctggcagcccagggtacaagacgggaaccaaccctggacaggatgccattccatcgcaggacacactcacacacagacccatgcttcctcacactgggacagtttagatacaccagttcacttaaatacacctttggggtgtaggaagaaactggagtacccagagaaaacccacaccagacgcagtgagaacatgcaaactctacacaaacagtggctctgtcaggaatattattttttctcgtcaaccaacattgaacaaaatgacatattggagaccctgctgtagttaatgcaattgatgagattcaacttccccatcattaacttactttttcaaatataaggagcatagcagcctcatctataactttttccaaaggtaacttcccacttctttatcagcaagtcactctgtcactgtattttaatatcctcttgtccacaaaccaggcttacatagtcttccttggagtttatagggatctgacaaattctttcagaaagtcagcatagctttttgtctatattgacatcaacacactaggtcagcctatgcgtctaagagaaacatgtcaacatggctgtcttactgcgtttctcattgtttttctctagagtgatatcccttgaaggtcatattacagatcgttttatcaaaggcatgtcaacaatagtaactgggcaatggttggtttcacctaatgagataagtcctccaaaaccactgatagcttgatgccctaacaaaacccagttgtctaaatatttcaccatgacttcaaactagtctcaaacttaacataattgatctgcatgtttcattctcagtcctcaagagtacattgcttaagatgtttcttctataagtatagggtgaaagtgcagataaatccaagtgtgcaaatggtatttcacttcattattcctccttctctgcccctcagtttatacacctgggcaaacatagatgtacagacatatctttatgtagttatgtatatctttacagcttgatgcccgagtctcagactcatgtaaaagcaaatctggtaaatgaattcagattatgacgtttgtaccatcctgaaatcagtctccaagaaaaggttcaagataccaacttatcagcagatttttttctgaaataaagactctcttcatggttaatttatagaatcttattcttactgtaacttttaaattggaggagattgggaggcatgacatataccaactttttgaatatggcattgtttcctagcattggtcaatgggatattgcccatccaggatgaggatattaatgtgactatttcaactcttctcttcactgaaatctgttcatctcagtgttatttattgccaggcacagtggcatatgcctgtattcccagctacttgggagctgaggcaagagggtcccttgagcccaggagctcaaagaccaacctgggcaacatagcaagaccccatttctttttataattgtatttatattaactgatctgagtgctaaaaataaattgtatagacacctttattcccataattagttattatcattcctaagaaattctaatgaggttagtcaaataagtcactggaaaactgaagtctcaacacaagagtaatataatgatttgcttatgggtacaggctgaatatattagaactccatgaactttagttttgacagattaaaaataaccagctaatgaaattaagcactgaagctttattcttaggttatccctagagaaataattcctcatttttattttggcttataacttgattacaaattgagagttggcttttttgtaccttttatggaattcaagtgcatttgattaagcatttaacatcactcccagaggcaagcaatctcaaagtgtcactgggcatggtaggcattaaacatcctggtttttctgacctgtagtcaaccttaaccgtgacctatcacctcctcaccacacactagattacctggaggcccttctctatcagaaagactatactagagatttgaacttcgtacaagtgagaattagatttaaattactaagctgattttcatttccgattttaatcaaaacttaaatacttgtctccagaaataaaagatagtcatgtttaactaataccagcagccctgtggctgtcctgccgtgagcagcttatcctccctcccccactcctttcctttctttctttctttttgtacaatgttgagttaaggtcaccatcatctactcatcactccaataagaattttaagtctggttaaaatattaaacatgaattgacaccacagtggtttggtatcatgcacgttagaaataactgctcaagttaaatgctgatgtttaattcttttgttatctttataggaatggttctccagtattattttattactgattttttaatgattatcctagactgggtaatttaaatatgtaaagctctgtaagtacatactggacctaatttgcaagtaaaaatatacctcatgcacatagtgggtgtgctctttagaggccaagaggctgttcagtatctgtcttaagatgtacctcccactctgtatctgtttattaatatggggctagaaatatctttctttttatatatgtatatatgtatttttttattttattttaagttctagggtacatgtgcacaacgtgcaggtttgttacatatatatacatgtgccatgttggtgtgctgcacccgttaactcatcatttatattaggtatatctccgaatgctatacctcccccctccccctccccccaccccacaacaggccccggtgtgtgatgttccccttcctgtgtccatgtgttctcgttgttcaattcccacctatgagtgagaacatgcggtgtttggttttctgtccttgcaatagtttgctcagaatgatggtttccagcttcatccgtgtccctacaaaggacatgaactcatccttttttatggctgcataatattccatagtgtatatgtgccacattttcttaatccagtccatccttgatggacatttgggttggttccaagtctttgctgttgtgagtagtgccacaataaacatacgtgtgcacgtgtctttatagcagcaggatttataatcctttgggtatacgcccagtaatgggattgctgggtcaaatggtatttctagttctagatccttgaggaatcgccacactgacttccacaatggttgaactagtttacagtcccaccaacagtgtaaaagcattcctatttcttcacatcctctccagcatctgttgtttcctgactttttaatgattgccattctaactggtgtgagatggtatctcattgtggttttgatttgcatttctctgatggccagtgatgatgagcatttttttcatgtgtctgttggctgcatacatgtcttcttttgagaagtgtctgttcatatcctttgcccactttttgatggggttgtttgtttttttcttgtaaatttgtttgagttctttgtagattctggatattagacctttgtcagatgggtagattacaaaaattttctcccattgtgtaggttgcctgttcactctgctggtagtttcttttgctgtgcagaagctctttagtttaattagatcccatttgtcaattttggcttttgttgccattgcttttggtgttttagacatgaagtccttgacccccatccctatgtcctgaatggtattgcctaggttttcttctagggtttttatggttttaggtctaacgtttaagtctttaatccatcttgaattaatttttgtataaggtgtaaggaagggatccagtttcagctttctccatatggctagccagttttctcagcaccatttgttaaatagggaatcctttccccatttcttgtttttgtcaggtttgtcaaagatcagatagttgtagatgtgtggtattatttctgagggttctgttctgttccattggtctatatctctgttttggtaccagtaccatgctgttttggttactatggccttgtagtatagtttgaagtcaggtagtgtgatgcctccagctttgttcttttggcttaggattgacttggcaatgcgggctcttttttggttccatatgaactttaaagtagttttttccaattctgtgaagaaagtcattggtagcttgatggggatggcattgaatctataaattaccttgggcagtgtggccattttcacgatactgattcttcctacccatgagcatggaatgttcttccatgtgtttgtgtcctcttttatttcattgagcagtggtttgtggttctccttgaagaggtccttcacatcccttgtaagttggattcctaggtattttattctctctgaagcaattgtgaatgggagttcactcatgatttggctctctgtctgttattggtgtataagaatgcttgtgatttttgcacattgattttgtatcctgagactttgctgaagttgcttatcagcttaagaagattttgggctgagacaatgggattttctagatatacaatcatgtgacctgcaaacagggacaatttgacttcctcttttcctaattgaataccctttatttctttctcctgcctaattgccctggccagaacttccaacactatgttgaataggagtggtgggagagggcatccctgtcttgtgctagttttcaaagggaatgcttccagtttttgcccattcagtatgatattggctgtgggtttgtcatagatagctcttattattttgagatacgtcccatcaatacctaatttattgagagtttttagcatgaagcgttgttgaattttgtcaaaggccttttctgcatctattgagataatcatgtggtttttgtctttggttctatttatatgctggattacgtttattgattttcatgtgttgaaccagccttgcatcccaggaaagaagcccacttgatcatggtggataagctttttgatgtgctgctggattcggtttgccagtattttattgaggatttttgcatcgatgttcatcagggatattggtctaaaattctcttttttggttgtatctctgccaggctttggtatcaggatgatgctggcctcataaaatgagttagggaggattccctctttttctattgattggaatagtttcagaaggaatggtatcagctcctccttgtacctctggtagaattcagctgtgaatccatttggtcctggactttttttggttggtaagctattaattattgcctcaatttcagagcctgttattggtctattaaaagattcagcttcttcctggtttagtcttgggagggtgtaagtgtccaggaatttatccatttcttctagattttctagtttatttgcatagaggtgtttatagtattctccgatggtagtttgtatttctgtgggatcggtagtgatatcccctttatcgttttttattgtgtctatttgattcttctctcttttcatctttattagtcttgctagcagtctatcaattttgttgatcttttcaaaaaaccagctcctggattcattgattttttgaagggttttttgtgtctctatctccttcagttcttctctgatcttagttatttcttgccttctgctagcttttgaatgtgtttgctcttgcttctctagttcttttaattgtgatgttagggtgtcaattttagatctttcctgctttctcttatgggcatttagtgctataaatttccctctacacactgctttaaatgtgtcctagagattctagtatgttgtgactttgttctcattggtttcaaagaacatctttatttctgccttcattttgttatgtacccagtagtgattcaggagcgggttgttcagtttccatgtagttgatcggttttgagtgagtttcttagtcctgagttctagtttgattgcactgtggtctgagagacagtttgttataatttctgtacttttacatttgctgaggagtgttttacttccaactatgtggtcagttttggaataggtgtgtggtgctgagaagaatgtatattctgttgatttggggtggagagttctgtagatgtctaagaagtatcttttagtgtgctcagcaagtcatgttattttctttgatgtatttcttctttgaagcttttaacctctttgtttatctgtattgcatcctttaaagaattcaataaatttcaaattgaccatttaaggatataagcaagaatactcactaaaagtagctataagtgaaatattggtaaataaaattaaaaggatcatttattctattaatattatttgccccaagtagttaatgaggtgtgtattttccgtaagactgcattgtttgtttttttctaggcctaagacagtatagcatgtgtgagggccaaaagttttgtcctgttacctctgacaagatggagcaaaacttagaggtctagagggttgatttaagcttccaaaaacaaaagaaagaaagaaagaaaaagaaaagaaaagagaaagaaggaaggaaggaaagaggttttttctgtttttttttaccattcctaagaacaaccatgtgtttgtgtgtgaagaatggttatttaagcagggaaaacattataggtacacgtacaaatgatacctgatttacaagtaaaaatataattgatgatgtaaatgtgagtgcattcacatttaggggcaataggtctgttcattgcctctccccacttcccaccccaaaatacagctctggacatatgcatgatcaatatgcaaatatacacagcatatttacattggaaacaaatgtagctagttatagaaaaataggtggagctgttttaagcattcattaaatctctcagtgcaaggggatgaattaaactttataaggctgctataaaaagaactattttagaatttaaatatggctgtataatgtagtgcttgttaccatgttcaattttaacacccaaatccaatctccaaaaaatactccaaatgagggtaccacattagggaacctgtgactgtgcccaccacacaagcattttaaaattggggcctcagcatgtctcattttatacagaattaaaaggaaattccttgaatttccaaacataattctgtggtttgaccagtcttaagtaaatatgatgttgagttagggtcctggtagataggattctgtcagcacatccacggggtagaaagcctggtgctttccacctgttactggtctgcgcggtcacaaccaagaagccaggtttctacaactcatgttcttgtctttaatgatgtatcttggagaaagaattaaagtagtgtaatataaatgttgaaatgtatgtttaaaaattaaaacaccaatgagggtcacattttcatgaagaatgactggcactgctacttacatgagaagtaataatcaaaaccaggcatatgagaagggcaaggaaaaggtgcagttgtgtgccagacattgtgctaggtactttacagtgggagagtgggtggcggctttcagctgtgtaacttgaagaaccgaaaattcctccttgtcaaaaaagtaaacaatatacacacacacacagacacgcttttgttcccattattttgtgtcagtttcatttatttttgttaaatatagcttctctttatggttctctttgaaaatgtgcatccctctgggagagatgacacattaggtgacagtcacattatgatgtgagtcaaggtatatgaacgtgtcaggaaggggaaataggtcccggaattagccaaatagggagggagggaggcaaccagatgcaagccggatttccactactttacaaagctgctgtgcagtcttttagagagaggcccaactctaattattacactctcatgaacagtgagaaacttggagatttcttttgtatgtccttatcccaaaaataggcatggctttttttttttttttttttttttttttcagtgaaagaggtttgcagctggactgggagaattaaggtgagaaaggtcaacaggttacagaggccagtgcaacagggcttgttagacgtaatcaaagacctgcttagggaagctgcaggaagcagaaggttgggatttccacctagggaggttataggggccctctggctaaagggaagttggctcaactctgaaaaggtttaaaatccagtttaaaattctgattaggaaaatcccacaataagcagttggtctttttaaatgtttcccctctcacagggcaagatgcttctgcctaatagttcagcatcattggaaaggacttagtgtgttcgcagatcactttgataagcgcttctgccacctcttttctttcctcctttttgtgctttaagaacctccgtcatgagatcgttttcttctttctgagattggtctccctagggaagaccagaatgacaatgtagactaaattgttgtccagagttgtcattcatttgttgcttttgaacttagagagatggaagccactacatattaatgcgttgttttaatgtataagccaacacctcacacttactgagcataaagttttttgccatgtattttcccttttttgcagtagtcttagccctctgtcaaattaacatgtttgcctcttttgaaaactcatatttcctcctgaaacagtaagaactaaggagaagagcaaagcattggaacagtccctgctgaagacaatagtatgataagaacattgaaaaatacaatttaataggctaaaatgcatttgggacatcaagttattggccagaatgcatctttatgcatagcaagccttgccagtggggatctcatggggagtaatggtgattaaaaggtttttgaagagcgaagttgtgtaaccaagcttgtataagagactgaaacttggttcatctcgtagtggacagcctgaagacagacactccagacatgtgttagtccatttgcattgctataaaggaataactgaggctgggcaatttataaagaaaaagttttatttggctcacagttctgcagggtgtacaagaagtatagtgccagcatctgcttctggaagggcctcaggaagcttccaatcaatggtggagagtgaaggcaagtcacatggtgagagaaggagcaaaaacgaaagcaagaagttgccacactcttttgaacaaccagatctcattaccactcattactgagggaagagcactgagccgttcatgagggatccacccccctgaccccaacacctgccactaggccctagctccaacattgagggtcacatgtcagcagatttggaggggacaaatacccaaaccatatcaagaaagtatttggtggcccagttaagagatgacaaaggctacaaagaggaaggaaaggggaaaggccaagagatatctgggaattagaatcctcaggacttagtttccttaccactatggcagtatcagtagtgactgtgtcccaagctcaagaaagtgaacttgactgtgcctggtctctcacaaatttccagaccagtcttagtgaggtaaaaagatgcattctaggatcagtgaatattatttagtcatttcatgtacccagtgggttaatgcttctataactaaaacaagccattcccccttttctgccagcagaaagatggaaaacaaggttcacaatatgcttcccgtgatgtgttaggatttgtttggtcatgattttttatccataatagagggatatagtaagagtttgaatcccagaaatagaactgcccacttacttggctgaggcaggggtaggggagaagcactgtgtgtggacagaatttcgtcaggtggtagaacatgttgcctaaggggtttaaacaacagtatgttcgagttcaggcaagatgtcagtaaaacaggaaactactgaatacagactaaatgtaagaatctttatatatgataagaatcgaaaccttcagggactgaaagaaggtcatggggaatctggaagaccaagcaaaaggtcacttataggaaatggatcatgtctgctttagattcaaagccaagacagctgtatattaaaccccaaaaagtggcaccagacctgtcagaatgctcaccacgccaagtcagtgacttaaagagtcagtgatcctatgggtataaatatcagttaggcccaagaatggaaatgaagaaggatgtctagtctggaagaacctgccaccacccacaaactaagtcatcttgaccaataggttgaactgtacatgaatccatatattaaacaaatacttactgcatggtcatctgtggtatcctatatcctagacactttgttggttttgtgatataaaactgaaagagacactgcatccctcaaggagagggggaagttggcaggcacagagcaataagtttcctcctttttagaggtaatggttggtcccacctttagcagaagattcatataacaccctctcacaggagagaacaagagcaaggcctcagcccaaatcagagcccacactttcagtggacagtcactcctcagcacagacagcacccatgtgactcaccagactcccttgaccacagtttttccacagtcaaaggcaggcagaatggtctataaactgaaaccactgggttatttttatttcttggctcaagttcagattcccacacgtggtggagaccacggatacgtaacaatgtctagggcatgactgttgtattcacacccactatcacaattcccttgtcctactcttacccactgaagaggaatgtgaacagaaaagactttggggggtggaattgatatattttgcagtactagttactagtgggtggactacatgtgaggattatggaataaaaatttttttgaacaaaaggtgtgcattataaacaagtctcattatattattattatcattttttctttcgaggtgggagtagacagaagagacaatcaggataatcttgtctgtcatagccagagaacatcagaaaaatactccatttaaagagaatttattttctctggctggcagaaacaaacgcttgtatatcttatatataattatatacatatatatgtatacatatatacacacacatatatatatgtatacatatatacgcacatatatgtatacatatatacgcacatatatgtatacatatatacacacatatatatatacatgtatatacacatatatatgtatacatatatatatatatatgtataacactttataaaatacctggatacctggtgggtatagactaatgcagaataagctattctttaaaatctagtatccacagataataacaagtattggtgaggaagtggagaattagacattgctagtgggaatgtaaaatggtgcatctgccttggacagcactttagcagttccttacatggttaaacatagagttataagaccaagcaatcctacaactaaatatatacccaagagaaataaaaacatatgtccacataaaaaggtgtacacaaatgttccttgcagcattatttgtaatagccaaaaagtgaaaacagcctacatgtccatcagttgataaatggataaatataactgatatattcatacaatggaaaataatttgataataaaaaggaatgaagtattgatgctaccacacggatgaaccttgagaacatgctttgtaaaagaaaccaatcacaagagactacatattattccatttaggaaaagttttcagattagggaactacctagacaccaaagtagtttgattagtagatacccagacctaggactggtggatttgccagcggggagtaactgctaatgggtacagggtttctttttggaatgacaaaaatattctaaaatggattgtggtaatggttgcccaatctgtgaatatactaaaaaccattaaagtgtgcactttaaatgggtgtattgtatggtatgtgaattacatctcaataaagctgtttttaaaaacctagcttccaatatcttggcatcttggcctgtttcctccactacttgctgcagctagagctttttgcagtggtatttgggaaaagtaatgtgtggacctctggtatcttaagtcctctactgtaaggatattttctgagatttcattaaaaattattacttaattaagcctggaattgcaacccaatagcttctcagtaggaatacaccatctgtgctgttctttagatgagtttattctaaaaggacattttatatttcaaagtgtgcattgatttaatgtatgtagcactgctatatagacttacaggctgagtttttaagtttttaaaaatattttatcaagtatatacagccattgtatttttactgttttatgagcactattgactcaaggggcgttaattttgaatggttttaattttatccagttactgccttaggctatgttttgtggaatcttgcttttctatcccttaacaatatctagcagatcttttagcactcactactgcgggtcactttctcattattagaaggtcaacctggtccatttttaaactcccatcttatacctgatttaaatctaatatcttctttctactccatcaaaatgcgaggaacatggtctggtacctcctttttccccctaatcaagccgtaactccttgcgggtgagggataggtaataagtgagaacagtgtccctttacctaatttcacatggttgtcatcttcctgcatctttggcaaatacagccttgccatccatgccttctgggtaacaggtgtcaaaatgcttcttcacattgggtaactgggagagttcactgcccagttccctgatgttgaagacctagcctagactcaacccccttgcccagcccagcccatttcccagtagtgtactggtaaatgtttaacaaaaggctgggcaggggtggtatgtgtatatgtacatacctaagtttattgtacattttactgatgtaaacaatgtatagtaaataatttacaacagtaaacaatgtataataaataatttataaattataaaatatacagtactcttaaatgtaaatttcatatagccagctgattcttccagaaaggcattgatatttgccaaactctttcctgtgtattcatcctgtgattgcacctgacaaatgagtatatttctaacatgactgttgggtgatattttcatttaagaaataagacaaagtgaaacaaagatgtcagagcttgtttttagtaatgtcatgagcaacttctttgctaaatcaaataatagttttcaaatactagaagaatgtgtcctccaatttttgtactgttcacagtgtgaggactctagagatgatagacttttaagtttaatctgcattattagcatcttctttatcacttccttaagtctagacagtcaacaataaatcaagtcctgattttgtaccatttttgcatttcaagttgccaacataactcttaataaatggataattgggacaagatgcatgctagcacaatttttcccaccatgcacatagacaataaaaaagtaagagcatagagggtaatagtaaactgattaagaagtgatgagtttttaagtattttctatgtttgtttttaatattacctatttaattataagtttgtataatgttttaataatggctccagagcaccactgcccctcacacacagcattcttctaagaatctctttgctatcagagtcccctcacctgtgtgctcctttctttttttttttttttttttttttttttgagacagagtctcgctctgtcagataggctagaatgcagtggcacaatctcagctcactgcaacctccgtttcccaggctcaagtgattctcctgcctcagcctcccgagtagccgggattacaggcgtgtgccaccacgcctggctaatttttgtatttttagtagggacagggtttcaccatgttggtcagactggtctcaaactcctgacctcgtgatccgcccatctcggcctcccaaagtgctgggattacaggcgtgagccatcacgcccagcctgtgctcccttcttgataggacactgacaagatagcaaggatcgtacagaccgctttttttgccacttcctctctctactcagctagtctaggagcaggtcagcaggtcagctacctaagcaactcatatctgatttaaatttccagacagggataacactcaagagtctccttgaagacactctgaatctttactaacgaatctcttggtaccctcccgaagtggctttgagaaaggaaagccatcttttggaggggagggtgtggagaacaggacacctccactgccacacaaactacactcccaaggtagtagctcagtattcccacaaacgtcctttctcttctttttcatgttttatgttggactcctggagctggcagagccagcttatcttaataagtcctgagggagatattaatgtctccttggaatttgggatagttaatacctcttttagtatccctggttattgattctgaagcagtagcacatgttgctagatttaggcagttttatttagcattcccaattttagatctagtttgataatgtccattatttgatttaaatcatggaaatgatcgtttttctcccttaatcactacaagtcacacactgttatgtcttttgaggatacttaatctttctggtttgggttaagcctataattagtagtcaggtttttctaccttccaaactacaaaaacccaactttgtcctaatcacttcattttagactcagaggaattccagtgtttctaaatcctgataacattatatatgtatgtataattttaatttttattgtagattcagggagtgcatatgcaggttacaaaggtatattgcgtgttgctaaagtttggggttctgttgatcgtgtcacccagatagtgaacataatacccaataggaagtttctcagcccttgcccccttccccgactctcactctccttttgaagtccttagtgccttttgttcccatctttacatctgtgtgtgcccaggcttaactcccacttataagtgagacaatgcagtatttggttttctgtttctatgttaattcacttaggatagtggccttcagctgcatccatgttgctgcaaaggatatgattttgctccttttgattgctgcatgctatcccatgctgtatatgtaccacattttctttatccagtccactgttgatgggcacctaggttgaattcatccctctgcttttgtgaatagcgctgcagtgaatgtacaagtgcaagtgtctttttggtagaacaatctattttcctttgggtatatacccagtaatgagactgttgtgtcaaatggtagttttgttttgatgacattatttagagggacatgagagtcctataccctggggtgaaatgctttaattgctccaagtattaatctcatcaagattagggttctcaaaaaaaaattacagaaggaaaggaatgaggtacgatgaggacttaatttactagatatcaaaccctactataaagctatagtgatacaaatcaggagtgagtaaagcaaaagacaaattattccgttgaaagaataacaagtacagaatcaggtccagatacacataggaagcttgtgtatgataaagttaacatttcacataaaagttactgtaaatataggagaaagtaaatacgcaaagatatttctaaactagtgcagtgaatatagagagcctttataaacatgcatcaaaccagaaaatattaaagaaagatggactgctttgaattcttaaattttttaaatttatatttggccagagacatcataagctaggttaaaggacaaatcatatactgggagaaaatattttttccacacataatagatgaatcgtgttatctttagaagtgcactaaatttattttggctgagtactaaacagccagtattaaaatcaatgaacagcctaaggcaaagctgaatgttcccatcataaaatgaccttctgagatataagaataaatatgaaattttattttcaagaacttaatgttacagttttattattaaagcatcagtatgtttttaaggtttgtcattatgatgtaccaatatcttttctcagtgctgccagctgctaggtggttcctccacacttgcaatacctaaatagctgcttgttgtcagctgattaaaagcgtggattttgtgggcaatgtacgccaatatgggttactattcatggagattgtgctattaggtcaataagctctcctttttcttgaatagtaacaaaagggtaaagtcttctcaactcctagacttaaaaacttagctgatgatgacacactgtcattgaaacaatttcacaaactaaagctgtgtgcaatgcttaaacaaaacactttgactgaataaaaaaaaatgtggtacatatatgcaatggagtactattcaacagtaaaaaagaatgagatcctatgatttgcaacaacatggacggagctggaggtcattatgttaagtgaaataagccaggcacagaacgacaagcttcacatgttctcacttatttgtgagcgctaaaaattaaaaccactgaactcatgaagatagagagtagaagaatggttaccagaggctggaaaaggtagttggtgtcagagggagggaagtgagcacagctaatggatacaaacagttagaaagaatgaaaaagacctagtgtttgctagcacaacagggtgactataataaaaaataatttaattgtacatgttaaaataactaaaagagtacaactggattgtccataacacaaaggatacatgcttgaggggatgaatactccatttgccatgatgtgattgttatacattgcattcccatgccttatcagagtatctcatgtaccccatcaatatatacacctactatgtacccacaaacattaaaaattataaatttttataaagaaagcagtttgcaggctgatctcagtggcacacacctgtagccccagctacttagaagcctgaagcaaaaaaggattgcttgagccaaggagtttgaggctatagtacactataatcatgcctgtgattaggcactgcacttcatcctggacaacatgatgagaccttgtccctaagaaagaaaacactttctcaatatttaagaagcagacataagacttctgccattacatttttatttctaatacttttgcattcacttgctgcttcacacagtcaccagatgtgctacactttatgccagcagctgttgcttgttaccaagtcattttcttttggtacaggttgagtgtccctaatctggatattgaaaatgctccaaaatctgaaactttttgagcacctacatgactctcaaaggaaatgcgcattggagcatttcagaatttggatcttcagattagggctactcagcctgtattagcacttgcagtggataacattaaaaccatgtttgttccagcagccttttaacatgtggtggctgctcttctctctcattttgaacatttgtgtgaatacatgtgtagacaatgccagatgtttccttcatatattatgtagtttgtctttggctaaaagagatttttagtcccaagttacattcagaatgcttaccaatatttaaaaatcagtattcagatactaacagtaagtccaagtgatgatgttatgcttactatatgtgataataacctatatgatctttgatctctacaagttcagtaaacctggaaatgacattgaatgaggcatttgcctattccgtcttccaaaagctaaagcaaattttgaccgagtactgaggccaaagcttagttatagtgtgttttcaatatttatagtgtataaagtgttccttcatattagaaaaaatggactaaggacatgaacaaaatactcacagaagaaatacaaatggtgaacaaacttgaaaaaatgttaaacttcagtaggtatcaaattaaatacaggtacaacgacagattatttttctgttagtttggaaaaaaaacaaaaaagctgataatgagttggtgagaatgcccagaaagagagtaaattgtacatacttttattgaagggtggtttggcagcatttaccagacatttaaaatgtatacagtggtccaggaatctgccctccagaagtactcaaatatgtcctcaaagatttatacaagactgtaatatagttctaacagcaaaaaatcaaaatctaaatgtgatcataaggggagtggaaaaatgaatgctgactcactatgcaaaggaatgccttatagttactaaaactaatgtgctaagtcaatatgtgctgtctcagaaacacagctacggtacattgttacagaagaaaatgcgagttgcagaatgtctgtgcgatttctatttaaataaataaaatatggaaggatgagggtcaaaccattaactgtagttgcctcaaggtggaagggggtattgagttgaagagaaggtagtatttttttactttatacatacttctgtattatttgaatttattataatgcacatctgttatgttttaattttataaaagatttaaataaaactaggctagaccaaaccatggaataaaagtattatgaaagaaacaaaaattaattatttctctcattttaagacaactcacagatagcctccagtgacttggggagcgaaaagaataacattaatcaaagatacagtggaactgccggaggacagtggatcatagccttgaagaatccaagaaatggcaaagtgcaggccacaaattccaataacaaaataattatgtttaaaaaaacataatttttaaattatgtttacataattagaggagaaaagtgaaagaatgctgttaaaatcaccaccatgtccctatctctgacttcctagtaatccttgagtagagacaggacaaacatctatgatgcaatctatttataatgctagtgctgcaaaggaacacctgccttgtggagtgactgtgctatatatggctgttgttgtgtgtataccttatctacttatattcttctaatcatccatccatccatgcagtaaacatatagggtaagagggatacagagatgacagacagtcctgtgaggggagaaacttgtttagcactggttctccagtacctggaacagagtaggggctcaataaatatttgttgaatgagtgcatgggctcccgtccagtgagaaaacagaaaagtaaacagacagctaaaaggcagtactggcacacctcgtttgacagtgcttttgtgtttcacatatactgttgttattgttttttttttttaacaaattgaaggttagtagcaagcccgtgtctgtcagccccatttttccaacagcgtgtgctctttcatgtctctgtgtcacattttggtaattctcacaatatttcaaactttattattatatcctttatggtgatctgtgatcagtgatctctgatgctactattgtaattgatttgtaatggcctctaagtgttcaagtgaaaggaagagtcaaatgtctctcactttaaattgaaagatggagataattaagcttattgaggaaagcatgtcaaaagccaaaacaggccaaaagttaggcctcttgtgtcaagcattagccagttgtgaatggaaaggaaaagttcttaaagaaaatacaaagtgctactttgatgaacacaggaatgatttaaaaaaaaaaaaaagcaacacacccttattgctgatagggatttagtggtctggatagacagtcagaccagctacaacactcccttaagccaaagcctaatccagcataaggccgtaactctctgcaatcctgtgaaggccgagaggtgaggaagctgcagaaaaaaagttggaagctagcagaggtaggctcacaaggttttaaaaaagaagccatcttcctaacataaaattgcaaggttgagggtgaccaaggaacaaggcaggtgcaagatgtagaagcagttgctgatatagaagctacagcaagttgtccagaagatctagctaagataattgatgaaggtggctacattaaacagattttcattgtagatgaaacagccttctgttgaaagataccaatctaggacatttatagctggagagaaatcaatgcctggctacacagctttaaaggacaggctgactctcttagtaggggtctaatgtagctggtgacttcaagttgaagccagtgctcatttaccatttcaaaaatcctaggacccttaaaaacttgcctgtgcctactctgcctgtgctctctgagtggaagaacaaagcctggatgacagcacatcttttttaatatgacgtactgaatattttaagcccacggttgagacctacctctcagaaaaaaaaaaaaaaaaagattcttttcaaaatactagtactcaaagatctaatatccagagtctacaaggaacttaaacaaatttacaagaaaaaaaatttaaaagtgggcaaaggacatgaacagacacttctcaaaagaagacatacgtgtggccaataaaaatatgaaaaaaagctcaaaatcactcattagagaaatgcaaattaaaccacaatgagatatcatctcatgccagtcagaatgtctattattaacaagtcaaaaaacaacaaatgctgtcaacattgcagagaaaaaggaatgcatttacactgtggatgggagtataaattagttcaaccattgtggaagacagtgtgatatttcagtgacctagaggcagaaataccatttgacctaccagtcccattactgggtgtatacccaaaggaaaataaattattttgttattaagatacgtgcacacatatgctcattgcagcactactcacaatagcaaagacatggaatcaacccaaatgctcatcaattatagactggataaagaaaatgtgatacatacacaccatagaatactgtgcagccataaaaaggaacaagatcatgtcctttgcatggacatggatggtgttggaagccattatcctcagcaaactagcacagaaacaaaccaaacaccacatgttctcacttataaatgggagctgaatgatgagagtacatggaaacatggtgaggaacagcacaccctggggcctgtcagagggggcagggaaggggagcatcaggaagaataactaatggatgctgggattaatacctaggtgataggatgatctgtgcagcaaaccaccatggcacgtgtttatctgtgtaacaaacatgcacatcctgcacatgtacccctgaacttaaaagttaaaaaaaaatttttaaatactactactggttgataatacacctggtcacccaagagctctgatagagatgtatgaagagttgaatgttgttttcatgcctgctaacacagcatccattctgaaggccatgtatcaaggattaatttcagctttcaattcttattatttaagaaaactaggcagggcgtggtggctcatgcctataatcccagcactttgggaggccaaggtaggtggatcatgaggtcaggagatcgagaccttcctggctaacatggtgaaaccccgtaaaaatacaaaaaattagccaggcatgatggcaggtgcctgtagttccagctgctcaggaggctgaggcaggagaatggcgtgaacccaggaggtggagcttgcagtgagccaagatcgtgccactacactccagcctgggcaacagagcaagactccatctcaaaaaaaaaaaaaaaaacctaaaagcctgggtgtggtgactcatatctgtaatcccagtgctttgggaggctaggtgggaggatcacttgaggccaggagtttgagaccagcctgggcaacatagcaagaccctttctcaacaacaacaacaacaaaaattaaaagttagccaggcatgacggtttgtgtctgtagtcctaactacttgggagactgatacaggaggatcacttgagcccaggatcgcgaagttacagtgaactacgatcgtaccactgcactccagcctgggcaacagagcaagaccctgtctcttaaaaaaaaaagaaaaaagaatactatttcctaaggctatagtttccatagatggcgattctctgatggatctgaccaaggtaaattgaaaaccttgtgtaaaggattcaccattctgtgtgccattaagaacatttgtgattcatgggaggaggtcaaaatatccacattaaccagagttttgaacaagttgattccaactctcgtggatgatttgagggtttcacaacttttattggaggaaataactgcagatgtaatggaaatagcaagagaactagaattagagtagtacctgtaaatgtgactgaactgctataatcttatgaacaaacttgaacagatgaagagttgcttattatgggtgagcaaagaaagtggtttcctaagatgaaatctactggtgaagattgtttgaacactgaaatgacaacaaagtttttagaatattacatataaacttagctgataagacagtggcaggatttaagaggcttgattccgattttgaaagaagttctgtaagtgaaatactgtcaaacagcaacatcacatgcacagagaactctttcctgaaagggagagtcgatcgatgcggcaaactgtattgttgtcttattgtaagaaattgccatagccaccccagccttcagtaacctgatcagtcagcagccatccacattaaggcaagatcctccaacagtaaaaagattacgacttactgaaggctcagatgattgttagcatttttttagcaatatttttaaggtatgtacttttttaagacataatgctattgcacacgtaatagactacagtataaacacgcactgggaaaccaaaaaatatgtgtgactcactttattgtgacattcactttattgcggcagtctgtaatcagacctgtaacatttccaaggtatgcctgtatttgcagtgcaatgatagagatatgaacaaacaaatcagagatgggacacataagactgctaggaagcccctggaagacatcctcagggaggctatgcttgaactaaatgttgagaaatgagtagaagcctgccaggtaaaaaagtagaaaaggttatcccaggcagaggaaccaacataagcaaacaaacataatcataaaagagcagggcttatttttttattgcatattttaataacttgattcaggtaatcagatgtcccagaaaatatcccaaactttacaaaatatcttaagttttaaaaatccttatggtaatgtcacgtaacttcctatctaacgtcagatctgattcatgttaaacacgttttgcatatggcaaagggcttttatttcaggtaaatggtgaaattgttggtccttttattatttttttaatttttatttatttatttttgaggtggggtctcactctgacacccaggctggagtgcagtggcacaaccatagctccccacaatcttgaactcctggactcaagggatcctccagagtagctgggactataggcatgcaccaccacacccagctaatttttaaaaatttatgtagaggcggggtctcgctatattgatcaggttcatcttaaactcctggcatcctcgagcagggcttatttaaaaagctgaaagtcatttattatggttaaagcatgaggggaggaggctagaaagataaagtctggatcacagaagaccttgggagccatgctgagtttggattttatctgaagagaatgtctttaagaagacaatcaggtatatattcttaaaagatgcacacaaatacatatttgttttcaatttgtatatgctttacaaggattaattcacttaattctcataacaaactatgaagtgtaggtaccattattctccccattttgcagttgaggaaactgaggcacagtaatttcccaaggtgacctgactccgtggtggaactaagttaaaaacccagacattctggatccaatgcccatgcccttttccactatgctatactatctttgtgtttcttcaagatgtgtatgttttcttatgaaaggggaataaaaaaatttttcgtgtaatttcttccataccacctaccaaccaagatagaatgttctttggtcttgcaaatagagtcattcagcagttcagcagtctgcctgtcttttctccatttcctcaggattcactttcctcttaccacttagctgctgcttatcccttttagtctggattttttgttttagtttcaggggtacatgtgcagatttattatataggtcaattgcatgtcacaggggtttgatatacagttggttttgtcacccaggtaataagcataggtagtttttctatcctcacccttctcccaccctccaccctcaagtaggccatggtatctgttgtttgcttctttgtgtccatgggtactgaatgtttagctcccacttataagtgagaacatgcggtattttgttttctgttcctgtgtttgcttaagatgatggcctccagctctatccatgttgctgcaaaggacatgatctcattcttttttatggctgcataacattctattgtgtatatataccacggtttttttctttatctagatagtctaccattgatgggcatttaggttgattccatgtctttgctgatgtgaatagggccatggtgaacatacacatacatgtttctttatgatagaaatattcctttggatataccccgtaatgggattgctgggtcaaatggtaattctgctttgagttatttgagaaatcaccacactgctttccgcagtggtttgtggaaacgctttacactcccaccagcagtgtataagcattcactttcttcataacctttccagcatctgttattttttgacgttttaataatggtcattctgactggtatgtgatgatatctcattttggttttgatttgcatttctttaatgatcagtgatcattttttcctatgcttgttggccacatatatgccttcttttgagaaatgtctgttcatgtcctttgcccaccttttaatggggttcgttttttgcttgtaaatttaagttccatgtagactctggatattagacgtttgttagatgcgtagtttgcagatattttctcccatgctgtagagtgtctgtttattctgttgagtgtgtgtgtgtgtgtgtgtgtgtgtgtgtgtgttgtgtgtttgtttgctgtgcagactctctttcatttaattagatcccatttgtcaatttttgtttttgtcgtagttgcttttggagtcttcatcatggaatttttgccagggcctgtgtccagaatggtatttcctaagttgtcttccagggttttcatagttttaggttttacatttaagtctttaatccatcttgagttgatttttggatgtggtgtaaggaaggggtccaatttcaatcttctgcatatggctagccagttagcccagcaccatttattgaatagggagtcctttccccattgcttatttttgtcagctttgtcaaagatcagatggtcgtaaatatgtggcattatttctgggctctttattttgttccactagtctatgtgtctgtttttgtaccagtatcatgctgttttggttactatagccttgtagtatgctttgaagtcaggtcatgtgatgcttccacctttgttctttttgcttagcattgctttggctattcaggcccttttttggttccatatgaattttaaaatagttttttctagttctgtgaagaatgtcattggtagtttgatagaaatagcgttgcacctgtaaattgctttgggcagtatggccattttaacaaacttcttcctttccatgagcttggaatgtttttccatttgtttgtgtcacctctgatttctttgagcagtgatttgtaattctcattgtaaagatctttcacctccctggttagctgtattttattttctttgtggctattgtgaatgggattgtgttcttgttttggctctcagcctgtatggtgttgatgcatagaaatgctactgatttttgtgcattgattttgtatcctgacactttgctgaagttgtttatcaggtcagggagctttggggcagagacagtggggttttctaggtatagaatcatatcgtctacaaacagggatagtttgacttcctcccttcctattcgaatgcattttatttctttctcttgcctgattgctctggctaagaattccagtgtaatattgactaggagtagtgagagagggcatccttgatttgttctggatttcaaaaggggtatgcttctaatgtttgctcatttagtatgatgttggctgtgggtttttcatagagggctcttattattttgaagtatgttccttcagtgcctagtttgttgagggtttttaacatgatgatatgttgaattttaaaagccttttctgcatctgttgagatgatcacgtggttttttgtttgcgttgtttatgcaatgaatcacatttgttgatttgcatgtgttgaaccaaccttgcatcccaaagttaaagtctacttgatcatggtggatttgcttttttgtatgctgctggatttggtttgctagtattttgttgaggatttttgcatctacatccatcgatcccttttagtcttgttccctgtctctgtcctcccttttctaggtgggactataaaccctttggcttccagggtacccagtgtagctccatccattaaagaggcaaggtgggagttgtctgagcctttttcctctagaatcaaaggtgcacataccacagatctcaaaaaatgcgaagaggtagattacgcaatatgacaatctttttttttttttctggaaagacggtctcgctctttcgcccagctggagtacagtggcgcaatcatggctcactgtaatcacgaccccctgggctccagtgaacctcctacctcagcctcccaagaagctgggaccacaggtacatgccaccacacccagctgttttttgtttttttttttttttttttttttttgtagagatgggttctcactgtgttgcccaggcttggtctcaaactcctcggctcaggccatcctcctgcctcaacctcccaaagtgctgagattacaggcatgagccgctgtgcccagttggtatgacagtctttcactcgcttgcaaataatagtgattgttagttgacaggtatgtactctttgcttctaaattgtgtagggagacagaggtgagatagaggaagtagaggtgagtaagaagaaggtatgttccccttcatcagtgatcttgcagtcttacgctttcattcaggttattattttatgactggtattttgttaacaaaaatgccatgatgctggcttggagcagcggctcatcctgtaatcgcaccacttttggaggccaaggtgggaggacacttgaagctaggaatttaagaccagcctgggcaacatctgccgtctctaccaaaaaaaataaatcaataaactggacatgctactgtgtgcctgtagtcccagctactcaagaagttgaggcaggaggattgcttgagcccaggggtcaaggctgcagtgagctatgatcccaccactgcactccagccagggcaacagagtgagaccctgtctcaaaaaaaaaaaaaaaaaaagacatgatttttattaaacagatgaggaaatgtgatttagaggaaagctttgtatacctaacttccatctctatgatattctgttaaccacactgtagatcctatacttctgcctcaggaaacctctaatacatgccgtactggtgtttgggagaattaagtacttgaagtcatctaactctgttctgcataagtctgaacatgctcctcttttcaaaagtgtaaataatttttgaacaaaaacagaaaatgtgggaggctttgatttcaatttacttatctactgataaattttgtggcttttctttagtaaaaatgaggaaaactgacagatgataatctcaaatattaataaagatttgggaaaatagtaacaatctagaaacccaaaatgatgggaaatattttcttcttgttagagaaatagggtacagtaatttatgtttggagcctggcttggatggcagagtgaaactgtctcaacaaaaaaaaaaaattatttggttgataacatgttttttttttttattaccttttagtgttgctaaattcatgacttttatttaccatttattaagtttaacattctgctaagaaacagtattttcagactttcacattgaaaagtcctcccttaattaagcatatacaatttaccattttcagcagagatccattttcacaactagctcttcaggattattccactgagctgaatctttatgtgcagcatatgaaaaagtagtttgtagcctttttctcctttcatgaaatattagcttaaacatcagcactgctactgggggtaatattcagaaaatcatagggacatgtaaattgatatgagaagatagttactatgttgaatagaattttaagtgaacatcaaatactaattgttagtggtcttttttatttttttagaaacagagtcttgctctgtcacccaggctggagtgtggtggcatgatcacagctcactgtagtcttaaacttctgggctcaagcgatcctcccacctcagcctctcaagtaggctggactacaggggcacaccaccacacctggctaatttttgttatttttttgtggagttgggggtctcagtgtgttgcccaggctggtcttgaactcctggcctcaagctgtcctccaccctcagactcccaaagtgctgggattacagacgtgagccatctgacccagccaataacatgatttttttaattccttcattgtgtatttttactttatcccttcattttatactttaaacaaatttaagatttgtataacttccaaagatgcatgcatggtaatggtcctcacatcgttgtttttaaaacaaaagttggagagtacccaaacatctaaaaacaggaaattcgttcttaattcaggtattagaaatgatgaagtagatctacaattatctatgtaaaaagttatttaccatatcggtataaaaatcatagttattttttaaaagattacaaaagcagactataaattaatccctttttttttttttacatcatgtgattagaagtgtaggaagaaaacataccacgatgttaacagcagttttctttgcgtggatttatacacgagatggtctttactttcaacttcctgtcttgcatattgtctgaggtggttttctaaattattattaattactgttttatagttagtgtgtataattttacaggtggaaaaaaaattttttaatcaaatttgaaaacgtaaaagaaccttgaaagcaattaaatgttaagcatgcaaaaaaaagtttgcacaacgcacgctaattgttaccagcactctaacttgtttttaattgtttctccttttgcctgtactgaaatactattaacagttgatatgacacattttcccaccccacagcttcttgttccctttattcttcatttgtttccctccaccccctttgagctgaagtggcagacctgtcttattcccagtgtgtacactctggatgtgggtacagtttgaggtggaacatataagtcagtgttattcttctgacattgagccttaccttcatcagtaagttagaatggatcttcaatgtgtttcactaatataagttctatttaattaaacacctatcttgagtgatacagacttaaactattaaggatgcccacgtttcaccctactctttgcattctagaatgccaggaatcagaacaagattactttttttgaaggtagagaaatgtgactcagatttcactttggcccctattactctaatgtcattacttaagctcaagtgaaaggctacatttttaaaaaagtatcctggccaattgccagatattttgtgtctgtatttggtagtgctggtttaaatcttgttgaatcttgactggactgggtgaaatggtagagttttcatttcaacatctgagaaaatgaagaagaatcacaaagagtaggcagagaggcaaacgtttcgaacaaacccacatactaagtagtctactaattgtgatataagtgaatgtaggaaactggcttctccctggaataattattacgagatttacacaattccaggaaaacttaagcaagtcttgttgagcaggctttcaaaggctttgttatcatgagcttcagcagataggttaaaaagtggtgtttctattatacctttcatattgagaacatatgaccatgagtgccttacaaggttagtctcaggatcttcccaagttgccggtggtgttgggccacagacgtagttccatattctctactatttttttcctaccaaacattagcttttgatgatttttctcattttccctagtggatcctccttacctgactgctctaatatacccaaattcccaataccaaaaataggggaaatataaatcggggaaagagtgaaattagagaattggagggaaaagagtagaatctgggatctttaggaacctaagttactttttttttaattgctttgctttttgtttttttgtttttttgtttttttttttttgtctttttttttaaagagggtctcactctgtcacccaggctggtatgtggtggcacgatcatagctcactacagactcaaactcctggactcaagcgatcctgctgcctcagcctcttaaagtgctaatattacaagcatgagccaccgtgccccaatttttttaattaaacgttgacccaatcaatattctggatagagagctatctcccagcaccctgttaagttaagcaccctgttaactaacagcaccctgttagttaagagggtgaactctggctccaagccctgctccacccctttctccacgttgggcaagagactcagcctccttatgctccaatttcctcctgtgtcagctccttagaaatccatgtcattaacatattagagttttaggacatggttagtcatggtgagtgttagctattattaacatctattagtatttttgtaataatgagctatgtaggttggatgttaccaaattttgaggaagaagtggaccatctctcccctcttttgactgtccagctcagactctggcgtctcctcagataaggtaatctggcaggagaatgccacctgcctgtggtgctagcctagggtaaggagttgtccagaccgccaaacgtcttcccaggagagctcatcaagagcccatgagtcccctgcccacagcccacctgcattttctccgtgaaatatctacttgaagacaggcatctcacacctgtaatcccagcactttgggaggctgaggcaggaggataacttgagcccaggagtttgagactatcctggacaacatagtgagacccccaaaattacaaaaaaaaatttgaaaattagccaggtgttgttgcacacacctgtggtcccagctactcaggaggctgaggcaggaggaggattgcttgatcccaggaggtcaaggctacactgagctgtgatcatgccactgcactctagcctgagtgacagagcaacaccctgtctcaaaagaaaaaaaaaaaaaccaatacgaggggagcaaggtgagaagtatgtggtgggtacagggaaagagaataagacttgtcaagaaatatgacaagagctatcagtaaaatacagataggtgactcttggggcagctggtgtgaaatgtagtctgtcagcagcaggtgactggctcagccgcagcaatggtggtccaggttagaacagcagcttctcatctcctaccctcccactccttgccagctttctgaacacttcttcccccacagtgctggtatttactgactcccaactctgctttccttgcagctgaccctctggtgggcagcatcgccacacagtacatgaccaacagagcagagcatgaccggatggccagacagtggaccaagcggtacgccacataggggcctgctgcctgccgccccgcgggacctgtgcaagcacattcaccaagtgcatcggtagccctgcccacccctccagacctcggttcttattttcctatttttattaaatttggaaccattttgtgatggtatgttgtccatcttcccatcccagttcttcctgccccccttcctctctcccacgctctcttttatctctcattttattcccttgttgatttctgttaacttgaaagatttgggattttttcccacctcatcatagatgggaacttttgttttcagtgcaaacaatgttggagctgtaatagtaagagctttcttacaaagctttgtattactgtgtggttttgttttttttgttgttgtttatttgattttgatttttttttcttttatgtgatctttgggaaaacacattcagaattatatctcgtttctacttaaatgtagtgcttagggttaattttttgtactgaagtctttattggtgggtgcatgctactgggaacaagtttttgtacaaaagcttcaatcagaatcactgtgcattactgagactctgtttatcactagccttctgtccctcccgcagaagactgttggattgaacaaaataatatgtattttgatttacttaaagtgcttgtaaatttcttagggacctgccacttttgactgtggatcagttgatgtacacttgtattattaaagcactcaataaatcactgtggctgataactgcacttctggtaacccgacatttgctttgtgtcctggtgaccgctgtagccctacgtgcagtgaggcttgtctaattcaattacaggttcaagtgtatttttcatctcaaacctctaatatttctttggagttgagttgcttagcatgtggaatttctccagctgtcagtagcctgatgattttatggttgttatagtaaattgctatcattttacatattgactgggcattctttctgttacagccttctttatcaacaattaaaatatgtaactccaaaaatagccttcttgtgaaagtgaagtctgagctaatcattgtgttcagccactttcaactttatttctctcaaaattgttacagtgattgccctcaagctttgtattgttcatttttgttgttgttgttgttgttgttgctgctcttttttctccatgattttagcaaaagaagtaaactcaactgtattggtcacggtcagcccattcaatgacaagggtgtctgtctggcttcaccttcaggctattttagtgtgcagctataggaggcagaggaaacgtgggtggtgtagtttctaaaacacgctgacttgctgattgataattcagggttattagtgtaacaaagcgtagtggaaactcctactcctgctgcaccatacagttacagaccctaccatactcttggtctcatttaaggaaccattaacaccttcactgctgaaaagcaggatttataagcataagtcatccacctctaaatattttaacatttaaaatgcctgattcaaaagatacagtttttgttgtttttaactagttaaaaataaatcctaagaaaatatatttaaatattgcaaatgccacttctaaaccaaaatacctgagaatattttttgtctttttaataacgattttaccattcattttatttaaaaacatttctcagcatagcagggcactgtatggtctctgatgcactactcaaccctctagttgtagtagagggagccacagacagtacataaatgcattgggcagagctatattccagtgaaactttatttaccaccataggcatgggatttggcccatgggttgtagtttgccaatccctgacacagaccaacatagactgggggctggatgaaaaacaaataacgatgtgtcatttctttctttaacataaaataaattcaatatggtacaacactg

SEQ ID NO: 156 - DNA, 13098 bp, Homo sapiens
tggttataaaccgcccggccgcggcggctgcaggcggcgggcaaggacggcgggcacagcgcagcactccccgctcgttggcccgggtatcccagcgcggacccacgcgatacgctgacgccccgacgccgatccggccgagccaagtaagggggacggcccgagacggagaagggagagagtgggagtttcccagcccgcagaactttcgaagttgagaaaagaacccctggaacgtgcgctcagcactgggattttctggtaggggtcagagcttcaagtgcaaaggatgtcgcttctcatcagcaggttccttagttcaattcggtagaagggtcacctccctctacagatcgagtggtcagagagggcagcccttaatgatgctttatgtatttgttgtttgaatgtaagtctgccaactgaggtgctgcttttgagactaaaaaaccggctggtcgtcctggttagtggcgagatgttggggtacggagtgtgggggtgagggtgggagaggagtgtttgtgcatcttgctgattgcaacgtaagtacttatactttatcaccagtagccggaaaaacagacctcccggctaggggaggcagtctgcaaagggaaagttgtagagaagttgttgaatatcatttaggggagtcttcagccttctgatttgcttcaagaaggggatctgagaatggtggctcaggcctgtgatctcagcactttcggaagccgaggcaggaggatcacttgaccccaggagttcgagaccagcctgggcaacatagtgaggccactgtctctaccaaaaaataaaaataaaaataaaaaaactagtggacgtggtagtgcaggtctgtagtcccagctacttgggaggctgaagtggaggatctcttgagcctggcagttggaggctagctacagtgagctatgatcgtgccactgcactccagcctgggtgacagagcaagaccctgactcaaaaaaggaatctgagttgaattaaagaactcttgagaatggatgtggttttttaagaatgaggcactttctctgcaaatttcataggtctgaacatgagcaggtcatttctctgccagggtgtctaggtttggagccgggatgttttaaaagtggtatctgtgggtaagagggcacagctgaggcataaactttaaacagaaaatttcccccctacccccaataatggcaggtggatgctctccaggcagctggagagcatcaaggcaactttactaaacatggaagttccaataagtgcctgtccagtccagccagggttgcagtgggcaggggaggggagggtgatgtcattgccacgtgtttcccactgaggcacaaaacctgctggacactggtgcaattaagagccaagtttagacaagagcagctaacctgaccagctggtccccagcaacattaacttgttgcttttcaagccatctttggagtctgctggttctttccagctgcctttgtgccagctctgagtgcagctcttctttcatccaagtctgctttgaggaagggggaagcccatgggcagtgggtgatgttaaccgtatttgttttcccatgcaaatgatagtctgcctgaggagctggttactgacagtgtgggcagcatgtgtgtgtccagttgaaagcctgtcttgttggggtttgggggactgtttaattggtggtctttatgttagggatacttgcttctcatctcatctaataaaatattactgatgactgaccatgtatttgagcggagctctcactcatgcttactaatgctgccatcttggctgctttgctccccaggactcaacgatgactctgaataatgtcaccatgcgccagggcactgtgggcatgcagccacagcagcagcgctggagcatcccagctgatggcaggcatctgatggtccagaaagagccccaccagtacagccaccgcaaccgccattctgctacccctgaggaccactgccgccgaagctggtcctctgactccacagactcagtcatctcctctgagtcagggaacacctactaccgagtggtgctcataggggagcagggggtgggcaagtccactctggccaacatctttgcaggtgtgcatgacagcatggacagcgactgcgaggtgctgggaggtaggtgtcccagccccagtgggcttctttccaccaggggtggcccaggaagaaagagtgagggtgggtgacttatttacccacagagttgggagctgaagttaggcattttggacaattgatgggggagctgagtctctagaaaagcccaagcacaggctttcgggcaagaaaatgaaaatgcttgtagacaggaccaaaatctgttgatcctgggccagaaagggaattcttcagattccaattctaaatgggttggggaaggctgattagagagggcagagccagagggtcagcgccccacttgacttctgctgactctgacttgaacattcttcccggaactcagtatagacacagcctttttccatggttatacctaaaacaagccagttggaaaagctgttaggatggcttgatcagtttgcttccaccaatattagaaagttttgtgggtgttaaatagttcaaaatctgtatttgaaatagcataataattttttaaaatgtgaagtataacaatgaaactttctatagagtctgacagcttttcaagacaattttccctgtacaatttcatctatttattgattggagcctggcctatttccaaaactgttttgaggtgacattatctcaaaatgcatgtattcttcagctaggggtaaagcacagccctatgttctgctaagtaatatgaggatcctgatagccaatgccatccataaagtgtctttcagccacagcttcagtctgagcgtatgcgaccagggtagttatatgtccctatttgcagctacagaaataaaggaagcactgctcagtgtttccccaagtcacatggtctgtgttctgtcgcgactcacaactgaatcacagagtagggaggtgtcttagcgatgactcagttctcccctgcattgatgcatattaatgttattcctcactacccacagcccatctcatctggaggttttattcttcttgattgtctcagtgtcaaggagttcactgcctcatgaggcagctcaggaactgggctataaataatgactcattgttgtaacattgatttctctcctcactcctggaatctcagaagagtaaagggagaaatagggccagtgttgtacaattgattccctctttctttgtaaaggctgccaggtgacttgctaggaaagagaaacgggaggaaggggctagcatttagagtgaatgtttgcaacgggagaggcactttgttaggtgccttatatttgctgctgtttattttggtcttcacaaagttcttgtactcatgagtaaactaagtctcagggagatcaaaagccttatccagaatcacccaataaggaaggtggatttagaatttgggattttatcatcttagttcagttcattttaccatttctggggaacttgctatgtgccaggcactgtgttaaatacttcccacacatatttttgataatacttgaatcaatctggcattaatatacctatttgacaggtgaagaaatggaggcttacaaagtcaagtgactttcccagggtgaaaaaactagtacatggtatgaccaggattcaaatctagttgtgattgaacccaaatcctgtgtcttttcatagccccctgcagccccaggatttagcttccaaatactaagtatgacagcacattgggcatcagccacacacctggctctggcctaagctctgggatacaaggcgatggatgaggtataccatgccccctagtaatgagctaagtgttagttgctatgttgcagagcagggtcacattaactaatattttaagcagtaacgatacagtgctttgggcgttgacataaggaagagatggactgggagttgttttttgtttttaagagggaagaattgaaaaaagttagtggatagtagactttcaaaaatgtttgtccattagaatggagttgtatgtatccagagggtaatattcccataggcataaaatgttaagaagactgactcatacctggaatttggaaaggtagccttcccagatattttgggaacttctttgttgagagagagagagagagatgcccaatatgacagcacattgggcatcaggcatatggctgatcctggggccgcaggggaccatgaaaagacacaggatttgggttcaatcatgagagaaagggaatcctttccctagcttcttacacagagaatctgtaggacctgctggaatcactagttggttttgtttcccaagaggaaggttttctaaggcacacccctacatttttttttttttaaatcagcattcactgtaagaaaaaaaatcgacataatattctcataatgatttctcctaataaagatggatattgttacagttacactacagtaatcttatgactctctgtatacactgaatgccattcattcattcattcattcctaagaagttactgaatgtatagcacagagcttggtgaggcactctggggacatgcaaagagtcatggggcttcttctgcggagatgctcacagtatgcaatggagcataatgtatacaccaagtagaaattgagataggatgtggtaaatgtcttgaaagtggtgtaaggagagtgctgtgggaattccgaggcgaaaagattacctctgactgtggatttaagagcttcatggttggcccggcatggtggctcatgcctgtaatcccaacactttgggaggccgaggcaggtggatcacctgaggtcaggagtccaagaccagcctggccaacatggtaaaaccccatctctactaaaaatacaaaaaattagccgggcgtggtggcatgtgcctgtaatcccagctactgaggaggctgaggcaggcgagtcatttgaatctgggaggtggagattgcagtgagtcgagatctcaccattgcactccagcctgggcaacaaaagtgaaactccatctcaaaaatgaaataaaataaaataaaaataaaaataaaataaaataaataaaataaataaaagcttcatggaagagatggtctctgaactggaccctagggacaactaggatttggaagccctgagctaggtgggaaggcacaccacacatatatagcaaagtacggaagtctcattgggcttggggtttgatgatgggtttagacgcagctctgacactgacttggctgggtgctcttggacaagccacttagcctcctcaagctgcctcattagtgtaattggggtaatacctccttcatagggtgttacgaggattaaaggatataacatgttgagcatggagcatggtgcctggcacatagtaagtacgaaatgagcattagttagagctgattctgaatctaccatttccttttgatgtgcttatctttcaaaagtggtggtttccttgcttgtggcccctgtccactttggtcactgttggctggggcccgtggagctgtccagaggggaccggggccagtagagtagaggacagtatttgtagagcaggcatttcttctgaggttccttgggatcccctgagctatgaaagctggaagcagttgaaagttttcagggagagggatgctggagtctcagaactttagaggtgctgcaggagtcagttctggcagtgagagaacacttgggcgggtttcacacacacacagcacttgagccagtcttgggcagaaggggcctcacttccaagcacaaggagtgttaacgaaaaaattattaacatggtaaggaagactttattcagggccattgcagtaggcatcccaatagtggggagagatggggctcaattccaagtacaagaagaacaagtgggcacttagccaaggagcaggtgggagggggtcagaggatagaaaattactaagaggagacgtcaaggttagggggattcttgctgaagtcaggccaaggagcaggtgggagggggtcagaggatggaaaattactaagaggagacgtcaaggttagggggattcttgctgaagtcaggccaaggacttagactatcagaggtggtgggtgaggaatttgatcagatattgaaggtgggggattctcactaaactgacttagcaggattcttgctaaagctgaattctgccaggatggaaacggaagcccagggagaggccgggtagagaagaggattcagaggagcctgactaaagtttggtcagggagagagtctgtcagggggatcaaatgaggaaagacaaactggtctagagaaagtggctactgaccaccatcaccccttatagaacgtctgtctgtccccatcagcatgagttcttttgctacatagagtgtgcacagacaccccagctttcttccagtgcactggagaagtaggggtgtctccagacccagattacggaaaagcctcacagagactaatcagtatccaaacctttctccacacctttactggaagcagatttcaaagagctctcctagagtctggtattcttttccttcccttcttctcacctgattagcacttgaaaaggataaaagatgagctgagcaacttagatgaagagaaacctggagctctggttactcccaggcttgcacctggttaggggagagccttcagtcgggatgccatgtgtgctggaagggtcctggtgcacacagccagaggccgtatctaaactcatgtactggggtggggggtaaagtggggagcacacgtgctgagcagggaggagatggattgttttagcctcccaggcctccaacaccgtaattttcaggcaaaggtaagatcagacagaatgatcctgtcaggaagcttctagaacgggaaagcatgtttttactttcatggctgtgatccttagtccactttttctctagacttgttctgatatctcttaagccaggagaaagttgggttttccttttccgtcagcgattggaacacagtatgtttctatttgaatgactgggcactcaagcgagtcccctgtacctgagtggtgggctgagaaagttcctccatcattgaaggagttgtctgagtgcagggaggggttttagagaagagctaagaaccctgtggtgggaagcagcagtcaggccatccccgttctgtgctgctcaggctctgacagtctcccttgcgttgtctaatttacaggttgaggttgtgaggttctacccctggtaatccaaatagtcccactgtgatctcattccttctgcatattgtgagcaggcacacgatgggcgagacagagttttaattccccaagggcaaacacttactgattagaagaatgacgctgtgggaggtggggaaactcacagaaagacagggccatgcctggttaactctcttcttatttgtccaagttttccttctctaaggaagggaaacctctcctgattccaattcttagatgatgaagcattaaaccaggagcagtgtttttcgtaaactgctcgctattgtaaaacaagaagtgccctggttccaacgtagctctcttaagctaggatttatctgtagtgaggaagtgctgagtatggcaagaaccagcttccttcacctgaagaagtgataatggctaacactgactgagtttctactttgtgcccaggcttaatacaggtaattgtcacatagccctaaggtgtgagtactattatcaatcccattgcacagatgaagaaaactgaggctcagagagcctaagttgcgtagacccccagagttcataagggatggcacctggatttgaattcaggtttgcttgttttcacagccacaatgctatatttatcattcgttcactgtacaaactttattgtgcaccagcaatgtaccaatgtgctgggggacacagtaaacagcatagatgcaaatgtctgccctaacattacgagaggggcaggagggacagaaaataatagaataagtaagttaaatgtgttgtatgttaggtggcaataagtgagatggagaaacataaagcagagaaggaatattgtgggatagaagtgttgcaattttaaatggatggccaggaagcacctcccccagagggaggtaaggaaacaggccttgtgggtatttgagggaaaagattctagacaaaaagaacagaagaaaaatgataaatcattatgaaagtcataattttcaaaagatgaaattcaaaacaggaaacctcattgtgaaaatagagtggggatgggctcaatggtattgggatgagggaaatcccacttgcaaaaatcccactgtaccccttttctacgcctgccccccatggattttccaggctggaactgctttggcccattgtactgtactgtgttcacccttcacctacacaagatctgggctcaagtgcagggaggaaagtttccattaccaagtagagctggaggctgcatttctattatactcaagatggaaaaacaagcccacttattcctagggaacagcattttttttaaaaaaaggaagaaaactacagccaaaacagggagagtctcaagattcattcttgcacttgtccgaagaggagcaatgtctctgagcccaaagctcctgaaattgctagtgagtattcagtaactacccactgaaaggtacaatggacttatgaaaatgtggcttacagtttcactgggtggttaatgtttcctcatagcattaaccattgaatctgagtcaaaagctcttgagtaagtttatcctcacaaatgattttgccatacaaaaggtccaggaatgatgcaaacaaatgccttttactccatgtggtttagtgacacatgttcgagagagacgttctgctggataaggactggaggaattatatgtagaatgttgttgaaggtgacaaaaaatagtaatttgcctttgaaaatatctgtatacttacataattaattgcatatttagtaagtttatgttctagcacaattttctacctgaccctcttatggagaagtgttgcatattcgcctgactccaatatctttgttctttcttctctagaagatacatatgaacgaaccctgatggttgatggggaaagtgcaacgattatactcctggatatgtgggaaaataaggtatgcagagcctgtagctctctaaattcctttagggctttcctttcaacaagttgtttggtgcaagggtgaccttgtcctatatagtaggtgttccagatgaggtgggctcattttcttgattaaaagcatactgctgaagaatgagactgttctaaggaacaggtcgttcacagatgagttctgaataacaagcaagttgtagtgacttgcctttagttctattaaaaaacacacccaaaaagtttatttgttttagggaaaatacaaacaggcattgactgttattttaaataacatacatccatctcatatgaagttgagattctcaataccagtcttcaacattggctttttaaagattttaaaaagcttcagaacctatgtgctagacttctgttaattgaaaaccctcctagtcccacaaaagtgttcttaatctcatcacttggaaaaggcaaaagggagtttttgggaagtcagaaaaggctcatttttggtagattaaatagaaattggaaatgctgtttggcagagaagttgtgtaatttatcaaatcaagctgtagaagatactgaaaagtgaaaactttttggcataaatactggacaggctagcaatctttacagccaccagacatcttataggcatagaagaccaatgcttttagggagttggaagcgattttcttcctttttcctatttttcctatcagcaagtgtactttaggatacacatattgtttctttgcaaactgatgctttattccccaggcctaactgaactcacagaagatcttattgtttcattagggggaaaatgaatggctccatgaccactgcatgcaggtcggggacgcatacctgattgtctactcaatcacagaccgagcgagcttcgagaaggcatctgagctgcgaatccagctccgcagggcccggcagacagaggacattcccataattttggttggcaacaaaagtgacttagtgcggtgccgagaagtgtctgtatcaggtaagaggagcagagccaatactgtagaaacaatcgctggatcacatgtgttttccttcagacacgggttcttccctccttccacgaggctggatctaggaactcattaagatgctatatgaaattttaggtgtgtttctcagactcctacagtcccagtgggtctcctccacactagttgttctcccttgtccatctggtctacctgcaggatactaatcctcccgcttttaaggagtttcctggaattcccaagagtacagggaaatgaaagtagcatcttcatgcaaggaggatagggaactctgatttaggggaactgtgagaaagagtttcattgaggaaaaagaattctactctggctgactctggttcctgtgagccctagaaacactgtcctactctcctactccccatccctggcttctgaaatttcatttgaggcatcagtctgatggggtcacatattcttcttcatacttagctcagggaaaatctctatctgctgagtgggcagccaagtgcttttatagcccttgagattttactggcctaattcagatttgatcctggtacaattataaaactaaaatactacattgccgggccctgctcaggaggaaagacacctgataaagacaatgtacacactagtttgggaatgtcttcctactaggacacaactgtctacagtaatcattttttttccaaaccaaaacttgatgcatggtcattgaatgcaatgaaatacttgaaattgagactgtcccagaaaagcttgtataatttaactgtattacacatttgtaaaattctcaattttttcccaagatatctcattattgctttatttttatttttattttaaaagagaggaaagctaagcagtagaattcttatttccaattctggaaactgggtcaggagaaagagttgagtatgggcttgagaactgagcagacctggcttcactgccacttacaggctgtgtgaacttcacctgcagaggagactcccctcggtttcttcatgtatttgacagggataataatgtattttccaagattgttgtggacattgaaaacagtgtttataaagaacttagccttgttcttggcacattgtaagtcagcagtaaattaagggtatggcttttactgttataactaatatcactatatttgatgaaatgggaccttcagacagtgaatttatgggggatcagatctaaagcccatctcccttacttccagggaccctccagtgagacattttctattcatgccctgggagggcccatgccgcagcagcatcctctatccactgcatatacagctgacttagtgttacctcgaagaaccatccagcttgactgtgtgctatgtgggactgtgctctgcagtccctctgacctctttctttccttcccagaagggagagcctgtgcagtggtgtttgactgcaagttcatcgagacctctgcagctgtccagcacaacgtgaaggagctgtttgagggcattgtgcgacaggtgcgccttcggcgggacagcaaggagaagaatgaacggcggctggcctaccagaaaaggaaggagagcatgcccaggaaagccaggcgcttctggggcaagatcgtggccaaaaacaacaagaatatggccttcaagctcaagtccaaatcctgccatgacctctctgtactctaggaacccagggtcacccagatgtccctttgatggccgttgttgaaggccattgggaccaataatctatattagattgaatacttaagttagatgtggtttcccccattgtagcagggagctagcgtattagccttgtgggcaacatgatgcatgggaaatgaaagatttttgtaaaaagtcagtatttatttccaggaaaagcctgaccttgctatttgaacacccaagactctttagaggatgtgtttggtgttcacatgtgtttcttctattttggatagtagagaagtaaagcttacaaagaatgcctagaacaagaacttttcatcattaaaaatttttcccagtgttctgatatgtgactttgaggccaatgagtcataaacaaatataagaaagctgtcaatgagtttcttcaaaggagggaaaactttctacgaatctaagatccatggagctagaattgtagaactaggctcatcagaatcgtgactattattgctccatcaaactgtgaaaagaaatgatgtggaccttgctggaaacaaaggcttagcaaacaatttttgttcaatgcccaccaagacatatagaattgggaactgatacatgtgtcccttataggctcaaaaattatatcttacaatttcttatttagggggaaattatttgaatcagattctatttagtcaaaccaccttttatgttttattatttttgaattcatggagccatcataaaaatatttttaaaatcagaattattgataccctgtagtgcaaaatgtcaatttttaatgtataatcagaagtctgaatttttataaaacatatagcataaaaacttccagtactttggttgacccttgtatgtcacagctctgctctatttattattattttgcaaaataaccattttaacatttgataaagcatatttatgaacatatttcttaataagaaaaatatccattttattaccattttctatctttttcaaaatatgcaagtttttacctatatgtcttataataaaagaaataaaatatttgaaaaaa

SEQ ID NO: 157 - DNA, 37736 bp, Homo sapiens
agttaaatcttttctgcttactgaaaaggaagagtctgatgattagttactgatcctctttgcatttgtaaagctttggagatattgaatcatgttaccatttctgtttttttccaccctgttttcttccatatttactgaagctcagaagcagtattgggtctgcaactcatccgatgcaagtatttcatacacctactgtggtaagtaaaaccgcaaaacaaataattgtagcatcaactattttgagggtaagttttcacgagaaccgtacactgttgtggctggaacacacgaaacatcagtgtgttccagctgctgtggcggacgctgccagcaggaaaagcaatagctggcagctgccccatgagaatgttctcgaccactcacagagcttgtgagtctctaaactgtgttgtgcttgacctccaagtgcttctgttccctgcgtcatctttctctaccctgagcccagtttttggttctgcccatttttaataaaaccatctgcttctgagctttcacctcagccttgacacttactagttcttcttcttgagatggtagagcagtcccagctgcttcctggagttgatttctgctctaagctgtgactcttgagtgctcttggaatcatccccctcactggatgaaagcctggttctgtcactagctgtgtgaccttaagcaaagtactccagcctttttagcactgaagtgaaagtgattttatagtctacttgataagggtgttgtgaggtgaagttttttagcatagggtcacatagagacaataatactcttaatttttttttggagtcagccataccctaatactattcactggctgtgtcactgtcccctgccccagctgctcattagcaagtgtcctgggatctgaaggcacagtgtcaggcctgacagctgttttggttcggtactttccaccgtgctgcttaccatgggttggctgcccttttccacccactagcaatagctgggaggtttaaagtggtgcttcccaaaataccagttctttgagattcttttgggaaaataggatctatgacctaatcatctgggagagatttacagatgtactttgggttctgagaagttctgcaataaaggcacctgtttaaccacattttcaatttcatttgttgtttgtttgtttgtgttttagtctggagtgtatgttaactctcttgagaaacatgctctgccaaatgctaatataaagtgactttcgggaaattgggataattgccacatgtgaggaggagacttaggagtgtggccagtcacacaccatggcccttctcctggtgggttgcactgaattccctccaaacgtatgtctaaaatctctccatgctgcaagatccttttgcattcccctcttccagcaaggctcctactctacttggcccccacttccctctcctcctttggctcttttgtaccatgtgctaattatgccactgtgtgtgtgtgtgtgtgtgtgtgtgtgtgtgtgtgtgtgacagagttttgctctgttgccaggctggagtgcagtggcgcgatttcggctcactgcaacctctgcctcccaagttcaaacgattcccatgcctcagcctcctgagtagctgggactacaggtgtgcgccaccacacccggctaattttttttttttttgtattttagtagagacagggtttcatcatgttgaccaggatggtctcaatgtcctgatcttgtgatctgcccaccccggcctcccaaagtgctgggattacaggcgtgtgccaccttgcccggtttatgccactctttatatggtttttatggatgtaacattttgtattattatttagctttcaatcttttcttaacaataactcaatttgtctttttaaaacatttcacattttatcttattttatcatttatttttgagacagggttttgctctgttgtgcaggctggagtgagtggcatgatctccactcactgcaacctccacctccctggctcaagccatcctcccagctcagccttccaagtagctgggactacaggcacatgccaccacacttgtctaattattaattaaataattttttttgagtttcactcttgttgcccaggctggagtgcaatggcatgatcttggctcactgcaacgaccgcctcctgggttcaagtgattctcctgcctcagcctcccgagtagctgggattataggtgcccaccaccacacccagctaatttttgtatttttagtagagacagggttttgccatgttgaccaggctggcctccaactcctgacctcaggtgatccgcccaccttggcctcccaaagtgttgggattacaggcgtgagccaccgcagctggcctaattattaatttttttgtagagatggagtcttgctatattgcccaggctggtctggaactcctgggctcaagtgattctcccaccttggcctcccaaagtgctgggattacagatatgagccactgcacctggcctaaaatttcacattttaatcatttttgagtgtttagctcaattgtattaagtatatgcacattgctgtgaaaccatcaccgttggtgtatcttttgatttgactttctagtttttttttttactttgagacagtctcattctgtcatctaggctggagtgcagtagtacgatctcagctcactgcaacctctgcctcctgggttcaagcgattcttttgcctcagcctcctaaatagctgagattacagatatgcaccaccatgcctggctaatttgatttgactttatgaaggaggatcttccttccttctctctgagaaaccctgtggtcctttcctgctgccccactgacaaagggactgtgggcaagccactggaatacacatctacagcaagatgttgcttgttgccatccccactgccatatgactgccttcccggcctgagagaatccatcctgcccagccaaaaatgcatcacctgtgggaagcactgattcctctaggtaccattgtgagggtgttggtgacaacaacctctgattcactgtgatgatttccatgaaaaagaagagatagatttccatttggtcaagctgctgggcatctaagtgtatgtttttttaaacacagagtcttgctctgtcagccaggctggagtgcaacggtggaatcatggctcactgcagcctcaaactctgaggttcaagtgattttcccgcttcagcctcccaagtagctgggactacaggcgtgcaccaccatgtctggctaatttttaagttttttgtagtgatggggttttgccatgttgtccatgctggttttgaactcctggtctcaagcaatcttcctgcctcagcttcccaaagtgctgggattacaggcctgagccactgattccgggctacagtgtcttaattagttcaggtgccataacaaaataccacagactggatggctcaaacaacaaaaacctattttttcacagttctggaggctagaagtccaagatcaaggtgtctgcataattgggttctcctgaggcctctctccttggcttactgctgtgttttgaattttgtgtccttgcaaactcatgttgaaatttaattgccattgtgatgatattaagaggtgggacttttaagaggtgattaagccatgaaggctcttctctcatgaataaattaatgtcattattgagggagtgagtttctcataaaaagacaagtttagcccccttatgtctcctgcttttgccccctcttgcccttctgctcttccaccatgggatgagacagcaagaacgcccttgtcagataccagcaccttcacatggaacttaccagcctccggaactgtgagaaataaatttctgttctttattaagtacccagacaccaataatctgttatagcagcacaaagtggactaagacactcgcagctggctgctttctcactgtgtcctcacatggcctttcctctgtgtgtgcacatccctggcgtttctttgtgtgtccaaatttcctcttcttataaggacaccaacaagattggattagggcccatcctaacagcctcattttaacttaattacctctttaaaggcactgtctccaaatgcagtcatattctgaggtactggagccttaacatgtgaatggggacgagaggaatgaggacacatttctgtcggtccataacatacaaaaatggcaaaaattgactgatttattctcccagttttggaaaaggcaaaaaatgtgggtgtgtgagttggttcctaggatcttaggcacatgctttcctatgatcctgagtcattggtctcagttctaatctttattttttttttgctacagatggttagaaaatccaaggaattaatagattatttagtgaaaccaatattctctgagcatttagcatgcacttactctaggaactgaggagataagtgaattaacaacaaagacaaaagtccctgcccttatggattcagtaaaatattcagcatgtcagatggtggtaattgctgtgaaagaaaaataaggctgggggatgcggggtagagggtgcaaagatgcaaaaatggagaagctagggggttgcattttaaatcaggatggccagccagatgtgatggcactcaccagtagtatagcccagctactcaggaggctgaggcaggagaatagcttgagcccaggaggtcaaggctgcagtgagccatgtttgtgccactgcactccagtctgggcaacagagcaagactgaacctagctaatttttaaattttttgtagagacagtgtcttgctgtgctgcccaggccagtcccaacccctgggctcaagcagttctcctgccttggccttccaaagtgctggaattacatgcatgagccaccacgctaggcctaaaacctgtttcttttccttccttccttccttccttccttccttccttccttccttccttccttcattcctttctttctttctttctttctttctttctttctttctttctttctttctttctttctttctttctttttctgagacagagtcttgctgtgtcactgaggctggagtgcagcacgatctcagctcattgcaacctcccaggttcaagcgattttcgtgcctcggcctcccaagtagctgggactacagccatgcatcaccatgcctggctatttttttctgtttttagtagagacggggtttcaccatgttggtcaggctggtcttgaactcctgacctcaaatgatccacccaccttggcctcctaaagtgctggaattacaggcgtgagccactgcgcctggtcccggctaatttttgtattttttgggggatgggatttatttttttgagatggggtcttgctctgttgcccaggctggagtgcagtggtgcaatcttggctcacagcagtctctgcctcctgggttgaagtgattctcctgcctcagccttctgagtagcagggattacaggcctgcgccaccacacccggctaatttttgtgtttttagtagagacggggtttcaccatgttggtcaggctggtctcgaacttctgacctcagacaatccacccgcctgggcctcccaaagtgctgggattacaggcataagccaccatgcctggtctgtatttttttagtagagaccaggctgatcttgaactcctgattttaggcgatcagcctgccttggcctcccaacgtgtcgggattacaggcatgagccaccgtgtccggccttaaacctgtttctgtctaagtcttctccatctcatcatccacctaattccttaggccccaaaccagaagtatccttaagtatctctttccctcacctattacattattgtattagtcattcctgttttcatgatctccagattctattctatatccaagtgcttctcactgctctctaacactcatgccacatttgtctctccttggcctctacaaaaacctcttaaattgccctccctctgcttcagttcttgccaccatacaatctattcttgacacagaggccagagagatctttgcaaaatgaaaataagttagataatgtgacccctcctgctgaaaatcctccagtagctttcactacaattagagtgaaatctcaactttataccaagacctccaggactcctcaggatcttgaagcaatactaagactacctagaattacagtctaattagggggtccttcccacaagttttcctcccacatcagatgccatgtgcaagccctaggctgacacctgtggttctcactggctataaattggaggttcccctttcttgggtttgatcattgttagactaactctcagaacacaaggaaacactcatttatgtttactggtttattataaaggatattattaatacaaaggatacagacgaatagccagatgaaagagatatataaggtaaggtgcaggataaggggaccagagtgtccatgtcctctctgggtgcaccatcctcctagcatctccatgtgttcaccaacccagaagctctcctaaacctgtcgtccagaaatttttatggggtgttcatcatgtaggcataatcgaatgttaactctgtctgtagcccttctccccttcctgcaggatgggaggtggggctaaaagttccaagcttctcatcatggcttggtctttctcataactggcccttatccaggaacccaccaaaagttaccattagaaaaaaagatgctgctattgcccaggacagtctaaggaactagaagctctgggcaagaaattgggatcaaaaaccaaatgttaggaccaaaaattctcttaccactcccattgttctgtaaactacaagggttttaggatctctgtgccataaactggggcagagacaaaatatatgtttcttattatatcacagtatcacaaattctgtacacattttatagttttttttttctagttctgtaaaaaatgtcactggtgccaggcatggtgtctcatgcctataatcctagtgctttgagaggctgaagtgagaggatcacttgaggccaggagttcaagaccagcctaagcaacatagtgaggccccatctctacaaaaaaatgaagaaaaaaaaattcactgggtgtggtggcatgcacctgtagtactagcgactcaggagactgaggtgggaggatctcttgagcccaggagtttgaggttgccctgagctatgattgtgccactacactttatcctgggtgacagagtgaaatcctgtctcttctctctcaaaaaaaaggaaaaatgccattaggattttgatagagattgcttcaaatctggatctgtaggacactttgaatggtgtgaacattttagcaacattgtcttccaatctatgagcaagggatatctttctgtttctttttgtcctgttaatgtctttgatcaatttattttattgtttttactataaaagtttttaacttccttagtgaagtttattgtattcctcctggtactattgtaaatttgattgtttttctaatttcttttccagatagcttgttataatttttttttttttgaggccaagtcttgctctgttgcccaggctggaatgcagtggcatgatctcagctcactgtagcctccacctcctgggctaaagcaattctcatgcttcagcctcctgagtagctgggacgacaggcacccgccaccacacccggctaattttttatttttagtagagatagggtttcaccatgttggccaggctgatctcaaactcctgacctcaggtgatccaccctcctcagcctcccaaagtgttgggattacaggtgtgagccaccacacctggcaattttaatttttttgaaacaagatctcaatctgttgcccaggatggagagcagtggcacaatcttggctcactgctgtcttgaccttctgggctcaagtgatcttcccacctcagcctcctgagtagctacaggcatgtgccatcacatccagctaatttttgtattttttgtacagacggggttttgccatgttgcccaggcgggtcttgaattcctggactcaagcgattctgctgtcttggcctcccaaagtgctggggttacaggtgtgagccactgcaccaggcctgaaagcttgttgacagtatttagtaacattactgatttttgtaggttcattttatatcctgcaattttgcagaattcatttattagttctaacaacttttttacatttttattttctttaaaattttttaaagtttctaatagagacagggtcttgctatattgcccaggctagtcttgaactcctggccttatgtgatccttccacctctgcctcccaaggtgctgagattacaggcatgagccaccatgtccagccagctctaacaatttttaatgaagtctttagggatttctatatataagactatgtcatctgcaaaaagataattttacttcttcccttccaatttggatgcttttttttttcttgactaattgctttggctaggacttctagtactatgttgaccaagagtggtgagaatggacatcactgccttgttcctgatcttaaagtaaaacctttcagtttttcaccactgagtatgatgttgactgtgggtttttcacatatgaccttgtcctcaaagtcctagcctatcttaatgatctatgaaatgcctttcaggtcattctcccattgtcttgatgtagaagaacacttggctcccttctatccatactaatttcgttatcgaattttactataagtggccaaaagaagccatgcagcaccttgagcactttcctgcttatctatttcttctaccagatagagtagatccttgctcttaagttccatttttcacacagttttagggaacagacacaagtccatcaagttctttgcaactgtgtagcaaggatggcctttactgcagtttccaataccttgtttttcatttgtgtctgaggcctcatcagaattgcctttaccttccacatttctaccaacattctgattatgaccacttaagtaatcgctaggaatttccacactttccctacatttcttcccttcttctgagcccgcatcagaattgcccttaatgctctgttcatggcaatatggacttttttctagcctgttcctccaaactcttccagcctctgcctattatccagtttcaaagctgcttccatatttttaggtacctgttacagcaacacctcacctctctggcaccaattttctatcttcatctgttttttgctgctataacagaatacgtaagactgggtaatttataataaacagaaatttatttggcttatggttctggttgttgagaaatccaacattgaggcattgcatctagcaatggtcttcttgctgcatcatcccatggcagaagggcagaaggccgaaagggcacttgtcaggggtggggaaggaggctatactcatcctttcatcaggaatccacacccacaataactaatccactcctgcaacaacagcattaattcattcacaagggcagagccctcatgaactgatcacctcttagaggttccacccctcaacactcttgcactggggattaaatttccaatgcatgaacttcaggcaatgcattcaaaccatagcaacaccttatagttatgacagtctgttttaagctaatgacaacttaaattgaatcacatataacaactctacactttaggagttggagaccagtctgggcaacaaagaaagcctctatctctaaaaaaaaaaaaatttttttttttttttgagacagtctcgctctgtcatacaggctggagtgcagaggtgtgatctcagctcactgcaacctccacctcctgggtctgagtgattcttgtgcctcagcctcccgaatagctgagatgacaggcacgtgctgtgctgacatgcccagataatttttgtattttttgcggagatggggttttgctatgttggccaggctgatcttgaactcctgacctcaaaccatcggtccaccttggcctccccaaagtgctgggattacaggcatgagccagcacacttggcctctacaaatttttttttaattaaaaacaaaacaaaaaacaggccacatgtggtgacttatgcctgtaatgccagcactttgggatgctgaggcaggaagatcacttgagtccaggagttcaagaccagcctgggcaacatagtgagacctcatctctacaaaaaaaaaaattagctgagtgtggtagtatacacctgtagtctcagctattggcaagaggatcacttgagcccaggagttagaagctgcaatgagctatgattgcatcactgcactccagcttgggtgacagagcagacccccgtatttaaaaacaaaccaacaaacaaaactatttcattgggcttcttggatttgtatttccattatttccattttcttccctagatttgggaagttttcaaccaaccttccttccttccttccttccttccttccttccttccttccctccctccctccctcctttcttcctttcttccttccttccttccttccttccttccttccttccttccttccttccttccttccttccttccttcctttctttctttctttctttctctctctctctctctctctctctctctctctctctctttctttccttttctttctttttgagacagagtcttgctcttttatccaggctggagtgcagtggcgtgatctcagctcactgcaacctctgcttcccaggctcaactgattctcatgcctcagcctcctgagtagctgggattatagccattatttctttgaataaactttctgtagtctgttctttttttcttccacttctggaactctcataatgcatatatggttctggttggtggtgtctcaccattaccttaagttttcttcactcttttaaattattttttccttttgctcttctgattgaattcttttccagtgatctctctctgagttcactgatcctttctctacttggtctagtctgctgctgaacccctccagtgaactttttagttcagttattgtgttcctcagctccatgatttatttatttatttcttttttttttttttttgagacagagtcttgttctgttgcccaggctggagtgtagtggcacaatcttggctcactgcaacctccgcctcctggattcaagtgattctccagcctcagcctcccaagtagctaggattacaggcacatgccaccacgcccagctaatttttgtatttttttcatagaggtggggtttcaccatgttggccaggctgttctagaactcctgacctcaggtgatctgcccgcctcggcctcccagagtgctgggattacaggcatgagtcaccgtgcccagccttcagctccatgatttctgtgtggtcctttaaaatgttttctttcttcttgttgaaattctcactgcattcatgtattgttctcttgacctcagtgagcatctttatggaggtattttaaattgtctgtcaggtaaatcatataacttcatttccttagtgtaagtgaggaagatttgtcttgctcctttgtttgaaacatctttgcctgatctttcattttccttgtctctctgtttggcatctacacattacaaagcagacatctttttcagtcttcacagattggcctcacacaggaacatacccacacctattgttgtgggaatcaggaggacgagagagacctcgggggaaagcaagaggatctttattgaatgcactcagacccagcagacttaacatccaaaaactgggccctgaacaaggacagcacttgacttttatacacacttctaaaagggggtgggctagcttgaagcaggcttacagtggcacaaaagcaaggatatagaggcagaacaattaatccaattgtgacaggttcataactcaggactatacatgaacattgctatgcaacccagatgtctgttatctaggttttgctcaaaagagccttgcactggtttatctcataaccttcaccatggtgcccagacggctgtagttcaggcctgctcaggcttctcacgaccttcgctgtacttcttaggtaaaacagaatacttgaagttcctagttacagagaacaagaatctgtaaactcatatcataaaagaaaggaaaatttgtttttcctctccctatgttgagggagtgctggaagagtctccagagcacatttctttgtgtcctatcttctcagatagtgtttatcaagacttttcctgggtctgggccttgcctgctactgcctttgagatgagtcagcctaatacaggaaagcttatttctttctctttttaattttctttttctttctttctttaatttcccacttcactattagcctggttagagattctggggtcctctaccaactctttctcacttcagggagatgcaggcagctgtgtttttttgtccacctattccatactgagccagagatggggtggtgaagggaactgtggcatctaccagcccaagctgctgtctccattcccctgccaggcagctagactatgccagacctgtcagaactctaggactgatgagacagatataagttttctggggatccccagagaaattgggatgctggatgcatggattaactctttccctccccgggagaaagctgagagctaagatttttcatcttctcactctgtgctgagcagaggggaggattaatgatgcctatctgcccaagccactgcctttattctcccctgggtggtagactgtgccagactcatcagagctccaagactggcaagacagaagccagtcctctggggagccctcgtgaaaaagttggtgttctggacatgtgaaacaacttctctcctcccatgggtggagctaggagctggttgggggggtctcttcctgattgtatgacaccacaccagggtaataatctctgattagacagtgtcccaagtctccctactggctttgttgaatctggttttgtgttctccttgcatgcaggagtctttcaattagtttgatttttcataaagggaatatttctgtaaattgttgtgttagtggaggcaagaagagttcagggcttctgattctgccacattgctgatgtcattcttctggggagatattttcaatcatcatcaatttttcttattttataattttaatgcaagattcatcttaaaaggctgatattcagaatactatacttaatggagatgatttgtagtaatttattgacattatctttattgcttttagataaaatgcaatacccaatttcaattaatgttaacccctgtatagaattgaaaagatccaaaggattattgcacattttctacattccaagtaagttcaaatttttgcttttatagaccaatcaaaggagttaagaaatatcagtgataaatgattgtgtttcaaatatacttgtattcgttatctattgctacgtaacaaattaccacgatctttgtggcttaacacagcacacatttattatctcatcatctttgttgatcagtattctgggcatagcttacctgtgtctgcttcaaggtctcccataaggctacaatcaaggtgtttgccaggctggagtcccttctgaggctcaactaggaaatatatacttctaagctcacgtagctgttgtcagtattcagttgttagtattcagtcccttgctggctgttggccacccgtcagttccttaccacatgggcattttcagtatggctgcttgctttttcaaagccagcgagggggacagtcagctaactaggcaagtcacaatcttatatagcataatcatggaagtaacactccatcatctttgctgtgttctattggttagaagcaagtcactaggctagcccatactactgggagaggattacacaagaacatgtgggtagaaatgggaataacttcagctgtccaacaatcttacaggtatatccttcatcaatcattagctataagtaatattgggtttccattagtcaaagatctgtgtgtcagcaagccaggacttcaatattttttaaagatggtctttctagagaaaaatacagtaataatgggatgacagaaggccatgtgttttgttttgctttgtgttgtgtcttggttttcctctctatgactttgcttgttatcagcttagaaaaaactaacgcaggtggggtgatagcatggggctgtatctcagtctctgtgcagacacaaaactttttcctctcctaccagttaccaaacattgtttattgcctgtaagctctggaatcccagaaaactttagttttaatctttatcatcatcattatcacataatttacatcctagtttagatttggagcttgttttagattaatactttacagagtagttttacatgaataagcttaaacattttcccccgattttagttctctggcttaccagaaaaatgaaaaacaacaacaacaaaatccccaaaactgagaacccaggaatgatagacaacaaacttgtgttttaattttcatgattctagttgttcaacctgtttttttgacactctgtatctgcattcatttattcactaaaaagatgcttagtaaattgtaagtatcatgctaggcactgtgaattcattgataagatattctctctctctctctttttttcttttgagatggagtctctgtctgttgcccaggctggagtacagtggcatgatctcgtcggctcactgcagcctctgcctcccgggttcaatccattctcctgcctcagcctcccgggtagctgggattataggcacccaccaccatgcctggctaatttttgtatttttagtagagaaggggtttcaccatgctgaccaggctggtcttgaactcctaacctcaagtgatccacccgcctaggcctcccaaagtgctgggattacaggcgcgagccaccgtgcccagccaataagacattctcctgatcttcaggaatccatcagtgcaataggagagacagaactgcagatagtatggtataagtgaagtgacagcaacagggcttagtgacagcacagagcaaaggatgattaactctatttccttcactttcctggccaaagataaaataaataatctaaagttttgcttggctaaggctctacagtttcttcttttttcctaggttctgttttctggtctgttggcaggttttacccctacacaattggcataaaggatgatttacataatgaataatctcactttcaagtgaatcccttgcccttactcgcaggaaacaggttgtatctttccaggccaagataataagacagtacgaaatcatttagagttctctgaaaagcagacactaagaaggaattaggctagagatttcttggaggaaacgcttgtgaacagtaaaggggagaggaagccagagtaggctaggagaaaattcagattggggtgcaggtctgatacctttgaaaagagagtagggaggaaggagaattaagtaggataatcctcagaccagaatgcatccctgagacactcttgggctgggccaaataggaagccccagagcagaatgcctgttgtaagagacccatgacaggcgggagtagcctggctctagggtccttgcagtgctggatcattataggagcagcctacgagagggtggcctctggctgagtgctgagatagatgtgaaggtatggcagctgcaggctgtctgccagctactcttctcacagcagctgcttttgaagggaaatttgagggacatacctcaatggccatcacaagtgttttataatttctcactaaatatgacatttatataacaaattatattaattcattaacaaaataattattcagtcatatttttatagcgcaattatgtttccatagaatatactataatgttggtataaagtgtgaggccacattcatggaaatcaaccttatttttatggcctcatttctacttgaattcaggaagagatacaagtacaaacttgaaccaaaaataggttgagaatggaaatgatatcttttgagatgtcatagccttgctagtaaattatttgtatattattaactgattgacaaatcaaactggagcataagcttccttcaaggttatttctggaagttcctggaattgtctttggtaagctaaaaaatagtcctcttttataccacatgacagcctccatgtttcttttctttttttgagatggagtctcactctgtcacccaggctggagtgcagtggcgtgatctcggcgcactgcagcctttgcctcctgggttccaacgattctcctgcctcagcacccctggtagctgggattacaggcgcctgccactgcacccagctaatttttgtatttttagcagagacagggtttcgccatgttggccaggatggtctcgaactcctgacctcaggagatctgcccgccttggcctctcaaagtgctaggattacaggcgtgagccaccgcgcccagcccatgtttcttgtctctcactccaacacccatattgacatccccagcctgctgagccacaaaagtggtgtctcattgttgccatcgttcatgttcttaacgtgaccacagtggtgtccaaggacaaggagtttctcacaacttaaactattgagttgtcaaagcaggacttcctttcctggagttattgaagactggaatcttgctgtgtttcacgaagaaatggaagaaggtcctttgccctgcattgtcactggacaccacagtggtgctgtcttgtgcttctgtgtctccaggaattccttatgaaaatggtctttcaacttctacacacagcactgcttttggagaagttcaagcccaagtccatggagtaggccatgggatcactgtttgaaacagacgccatgatattcttctccacaccctaccctgaaagttgagaagtgaagacaaattaggaaagttggtggtgcttcaggttcagagcaatgagggcctacatgaaggcagcgcggtaatggggatgaaaaggaggttagaaagatttactgggactgggaattctagtgccaacttggtgatgaagaggaggaaatcacttttagatctgttgggtgaggtaactgggcaacatttgagtagagatattgaataaatacatgggatcaatgctcaggagaaaggttgagactaaagttgacttgagaattgtcaccttatgtggtacttggcctgagagagtgtgcagagtgaaaactaaggagaactgaggatagatcctggagaaatccaggagtcgatgaaatagactgaggaagaggagtcagagagattggaggacacctggaagggagtggttgcaccaacaccaaagaaggtttagggaaaggagcaggcagttctgttaagcatagccaagttcaaattaaagttagaaaagttgtcttttgattatggttacaatgagtcatggtgatcttactaggaaaatattttcagtgaggtagtggttgcaaaattgttttctttatgaaaaggattgtgcatcttttttggccaggcatggtggctcatgcctgtaatcccagtactttgggaggctgaggtgggtggatcacgaggtcaggagttcaagaccagcctggccaagatggtgaaaccccatctctactaaaaatacaaaaattagctgggcacggtggtaggcgcctgtaatcccagctactccagcggctgaggcagaagaattgcttgaacctgggcagcggaggttgcagtgagccaagattacgccactgcactccagtctttctcaaaaaaaaaaaaaaaaaaaaaaaaagaagaaaagaaaagaaaagaaagaaaaggattgtgcatctttttcatttgggccaactgaataagttggaagagttgagaaaaatgcattgattactggaatttttcatggtagctggaaatagggagatcatgaggaaattaaaaaataggcatacatttaatttttcatcaaaagattctattttattctcaagaaatctttcatcagaactcctagaaagttgactgtctcactgtccttcctttccttttcttttcttttgaattttctagcagaaccatagaactagacattttatgtctttatttgatagttttctcaatgaagttatgaaggctcttctgtttttaggcagagcatgcatagttttactgtggaacattgtatttgattatgatttactagttgccctctcagaacttcagttttctcatctgcagaagaagagtaataattgacatcttgtagatagttgtgatgattaaatgaaataatgtaagaaaagcacagggccccttttaactatacaataaatgttaattactatgtataaaagaatctactatttgagggcctaatgggattttttcttttaaagggagagatttaaagcaattatatttcaatctctatataactgtcaacaccatgaatcttccaaagcgcaaagaagttatttgccgaggatctgatgacgattactctttttgcagagctctgaagggaggtaagtattcagttcatattacttttagaataggaaataattctttatgaaaatgttatgaaaattaaatacattgaaaatgggaagttccttttctgctaataattctttttccatccaaagtttttactttagcagcttaaataacattttataactatatacttgaactgttaggatgacacttacatgatttgtattattaatatttttcatagtaacccaccagattttctatacagtccttggtttctttagtgacttctgcctttatgttcctccttggaattatttacagaataataacattcagaaattaggacccttacagagatcttgcaccaagggataaaaaaataaaaaataaaaatgaataaaaaaaaggaattaccactttagagctatattccagcttttccatttaccagcaatgtgacttttggcatgttattaatatttaacctttcttggcctcattttcctcagctataaaatgggaaagtaaaacacatcatacatagttttaagaattaaatttgagaatgtatgttaaaaaaaaaagcctagtacagtgttcagaataagaatccttcttttgttatgaattttccagtcctgtcatctttataatgagggaactgatgtttgcagtggcttagtaatgtgtccatggtcatttggagaactagtaacagagcagcatcctaactctaagacatgactctcctactgtgtcatgctttctctttggaaaaaaaaaatcccttagcagattactgtttttttttttaattgtgcatttcttttacacaatctctgtggaattacattgatattttacctgaatcttcaaagtttctctttcttgagacctcagaggtgtcagactcaaatcagcttgtctacttcttctctccctcctcccactttcttccataaacatctattgaacctaatttgagcaaatcgtgatttacgttctggttatctgaagttgaatggtaggatctccttcctcagaaagttactctggggaaaactggattgccatatgcagaagaataaaactggacccctagctctcaccacatacaaaaatcaactcaagatggatgaacaacttaagcataagatctgcaattacaaacatactagaagaaacctaggaaagattcttctggacattggtctaggcaaagaatttatgacaaagatctcaaaagcacaggcaataaagacaaaagtagacaaatgggatttaattacatcaaaaagcttctgcatagcaaaagaaataatcaacggagtgaacagacaacctgtagtatatgagaaaaaattcgcaaactattcatccaacaggggactaatattcagaatgtacaaagaactcaagcaactcaacagcaacaacaaaaacaaataaccccattaaaaagtgggaagagtggctaggcgcagtggctcacgcctgtaatcccagcactttgggataccaaggcaggtggatcatgaggtcaggagttcgagaccagcctggccaacatagtgaaaccccatctctactaaaactacaaaaattagccaggtgtggtggcatgcgcctgtagtcccagctacttgagaggctgaggcaggagaatcgcttgaacccaggaggtggaggttgcagtgaggcgagaccatgccattgcactccagcccaggtgacagagtgagactccatctcaaaaaaaaaaaaaaaaaaagtgggaaaaggacatgaatagacacttatagatacttttcaaaagaacagatagaaatggtcaataggtatattactaatcatcagagaaaagcaaattaaagttgcaatgagatatcatcttaccccagccagaatggctattcttaaaaagacaaaaagtaacagatgttagcaagaatatggagaaaaaagaactcatccatttttggtgggaatgtaaattagtatagtctatggaaagcaatatggagatttatcaaagaactaaaaatagaaccaccattccatctagcaatttcactactaggtatctactcaaaggaaaagaaatcaatatatcaaaaagatacctgcactcatatgtttattgcactagtcacaatagcaaagatatggaatttacctaagtgtccatcaacagacaaatgggtaaataaaatgtggtatatttacacaatggaatactattaagccattaaaaaaatgaaatcatgtatttttcagcaacatggatggaactagaggccattatcttaactgaaacaaaccaggcacagaaagtcaaatattgcatgttcccactcataagtgggtgctaaaaaatgtgtacacatgtactacagagtggaatgatagtgaagagttggaagggtgagggggtggatgatgtaaaattagttaatgggtatatgttacttgggtgatgggcaccctaaaagccctgacttgaccactacacaacctatgcaggtaatgagattgcacatgtacctggtaaatcagtataaataaataaataaaaaagtcactccattctgggaaagacagttataagaacaaaatttataataaaattatgtgtaattttattgtaaattgattataggtatgagccattgccatacaataaaattatatttacatataatttttttgtaaaattattgtaaattttttgtaaatttattgtaaaaaggtgtatgtaaataacatatagttctattagcaatagaactatatgttattggttttaactatataattactaaataactgtggcagaaaaactgggataagttttttttttgagacaagatcttatcttgtggctctgtcacccagattagagtgcagtggtgcaaccatagctcactgcagcctcaaactcctgggctgaagtcatcatctagtcacagcctcctgagtagcaaggactacaggcacagatcaccatgtccagctaatttttttttctttttttttggagtcagaatctcactctgtcacccaggttggagtgcaatggcacaatctcagctcactgcaacctccacttcccgggttcaagtgattctgcctcagcctcccgagtagctgggactacaggcgtgtgtcaccatgcccggctaatttttgtatttttagtagagacaggttttcatcatgttagccaggctggtctcaaactcctgacctcaggccatctgcctgcctcggcctcccaaagtgcctcccaaagtgctgagattacaggtgtgagccaccgcacctggccctaattttaaatttaattttattttaattaaaaaatagagataaggtctcaccatcttgcccaggctggtgttgaactcctgggctcaagtgatcctcctgcctcagcttcccagagtgctgggattacaggtgtgagccattgctcctggacatttttaaattttttgtagagacagggtctcactatgttgcccaggctggtcagacaagccttcaatagagtattttattagggtcttgaatctgagaacatcagagggtgagggggaaaaacattccctggagaggaaacagcatgtacaaacacatctagtcatgaaagagtatggtttatttggagagtagtttttttgtagttggagcagaatgtgcttgtggggaattgctggagatgagcctagaaaagggggcagtgtgagcatgtaactcatgcgcaaaatattggccggtatcctatagtcagtgggcagggatgacccactgagatttccatttttacagataactagcatccatatggcaggaggtgggggtaggctgaggcaggaaacttgggtggaaggaagagcatccaggaggctctgtgagagaccatgagggctgaacgagacggcggccagggagtagcagggaggagatgaaagagagatttttgggagacagaataggcaggatacactgatttaatgtggcaggcaaggattaggtaaaatcaagaccctcttgggctgggtgcctgtaatcctagcactttgggaggctgaggctaggagtttggggccagcctgggcaaggaggtgaaacaccatctctgaaaaaaaaaaaaaattagctgggtgtggtggtaccagcctttagtccagctacttgggactgaggtgggaggatcacttgcacccaggaggtcttggctagctgtgatccaccgctgcactccctgacttaaaaaaaaaaaaagaaaaaaaaaaaagcaccacacttgagggccagtgactggatgtatggaagtgccattatctgagatgatgtgtacaaaagaacaggcaggtttttttttttttttttttaaagggaaacataatgagttctggcttgggcatgttaagctcaaggtaattttggaatattcaaataaacatggccatctggcagctgagtatgtgggcccagaacttaggactttctgatttaagaagcattgacgtatcaagagacccttgaaatttgggagtcgaatttgcaagtaccatacatatctatgtttaaaataattttccttttggttgttataaaagttatacatctttatgatatgatatttagaaaatatggacaagcaattataaagtaaaagttacccataatctcaccagtttacacacacacacacacacacacacacacacacacatatatctgtttctctcaaaaacacatttatgaatcaatggatggatatttcaaagcatcttaaatttaataagcctgggctgggcacggtagctcatgcctgcaatcccagcactttgtgaggccaagggaggtgggctgcttgacatcaggagtttgagaacagcctgggcaacatggtaaaatgccgtctctaccaaaaatacaaaaattagctgggtctggttgtgcatgcctgtggtcccagatacttgagaggctgaggcgggaggatcactggagcttgggcagtggaggctgcagtgagccgtgattgcaccactgcactccagcctgggcaacagagcaagatcctgtttaaaaaaaaattcataagcctgtaagttctgttaccgggattttgctggggctgctgttactaagtaccataaactgaataccttagaaaaacagaaatttatcatgtaacagctctggagtccagaagtctgaaaccaagataacgaggccatgctccctctgtaggagctaggcatggatctgttccaggcctctctcctagcttctggtggcctaaggcatgtcttgccttgtagatggtcatcttcttcctgggtcctttcactgtggtcttccctcctatgtttgtctatctcagtgtccaaatttccccttcttaataaggacacttgcatattggactagggcccaccctaatgacctcattttaacttgattatctgcaaagatcctgtttctaaataaggtcatgttcacaggcactggaggttagggcttcaacatatctttttgggggacacaattcaatgtacaataccatctgaggctcagatcccgccccctgcatagctgccaggaaaactagactggaccatgagtgagctgcatggataccttttgagaagaggagaggagagcctaagaaggggttctgttctccctcgccctgcctcagttccctcttgccttcttcaatgtgggcaaagcttcaagctaacttcctaagaaaagaatggaagggtccgttccaagatggccaaataggagcagctccagtctgcagctcccagcgtgatcgacacagaagacaggtgttttctgcatttccaactgaggtacctggttcatctcactgggactagttggacagtgggtgcagcccacagagggcaagccaaagcagggtggggcattgcctcacccaggaagtgcaaggggtcaggggatttccctttcctagccaaaggaagctgtgacagactgtaccaggaaaattgggacactcccaccttaatactgcacttttccaatggtcttagcaaacagcacaccaggagattatatcctgtgcatggctcagtgggtcccatgcccacagagccttgctcactgctagcacagcagtccaagattgaactgcaaggcagcagcctggctcgggaggggcgtccgccattgctgaggcttgagtaggtaaacaaagaggcctgaaagctcgaactgggtggagcccaccacagctcaacgaggcctgcctgcctctgtagactccacctctgggggcagggtatagctgaacaaaaggcagcagaaacttctgcagacttaaaggtccctgtctgacagctctgaagagagcagtggttctcccagcatggtgtttgagctctgagatcggacagactgtctcctcaagtgggtccctgacccctgtgtagcctaactcggagacacctcctagtaggggcttactgacacctcatacagctggtgcccctctgagatgaagcttccagaggaaggatcaggcagcaatatttgctgatctgcaatatttactgttctgcaatatttactggtctgcagcctccgctggtgatacccaggcaaacagggtctggagtggacctccagcaaactccaacagacctgcatctgagggtcctgactcttagaaggaaagctaacaaacagaaaggaagagcaccaacatcaacaaaaaggacatccacaccaaaaccccatctgtaggtcaccatcatcaaagaccaaaggtaggtaaaaccacaaagatggggagcaaccagagcagaaaagctgaaaattctaaaaaccagagtgtctcttctccaaaggatcgcagctcctcgccagcaacggaacaaagctggatggagaatgactttgatgagttgacagaagaaggctttagaaggtcagtaataacaaacttcgctgagctaaaggaggatgttcgaacccatcgcaaggaagctaaaaaccttgaaaaaggattggatgaatggctaactagaataaacagtgtagagaagaccttaaatgacctgatggagatgaaaagcgtggcacgagaactacatgacacatgcagaagcttcagtagccaattcgatcaagtggaagaaagggtatcagtgattgaagatcaaattagtgaaatgaagcaagaagagaagtttagagaaaaaagagtagtaagaaatgaacaaagcctccaagaaacatgatactatgtgaaaagaccaaatctacatttgattggttacctgaaagtgatggtgagaatggaaccaagctggaaaacactcttcaggatattatccaggagaacttccccaatctagcaaggcaggccaacattcaaattcaggaaatacagagaacaccacaaggtactcctcgagaagagcaaccccaagacagataattgtcagattcaccaaggttgagatgaaggaaaaaatgttaagggcagccagagagaaaggtcaggttatccacaaagggaagcccatcagactaacagtggatctcttggcagaaactctacaagccagaagagagtggtggccaatattcaacattcttaaagacaagaattttcaacccagaatttcatacccagccaaactaagcttcacaagtgaaggagaaataaaatcctttacagacaagcaaatgctgagagattttgccaccaccaggcctgccttacaagagctcctgaaggaagcactaaacatggaaaggaacaactggtaccagccactgcaaaaatatgccaaattgtagcgactattgatgctaggaagaaactgcataaattaacgagcaaaataacaagctaacatcataatgacaggatcaaattcacacataacaatattaaccttaaatataaatgggctaaatgccccaattaaaagacacagactggcaaattggataaagagtcaagacgtatcagtgtgctatattcaggagacccatctcacatgcagagacacacataggctcaaaataaagggatggaggaagatctaccaagcaaatggaaagcaaaaaaaaataaaaaaaataaataaataaacaggggttgcaatcctagtctctgataaaacagactttaaaccaacaaagatcaaaagaaacaaagaagacaattacataaaggtaaagggatcaattcaacaagaagagctaactatcctaaatatatatgcacccaatacaggagcacccagattcataaagcaagtccttagagacctacaaagagacttagactcccacacaataataatgggatactttaacaccccactgtcaatattagacagatcaatgagacagaaggttaacaaggatatccaggacttgaacacagttctgcaccaagcagacctaatagacatctacagaactctccaccccaaatcaacagaatatacattcttctcagcaccacattgcacttattccaaaattgaccacatagttggaagtaaagcactcctcagcaaatgtaaaagaacagaaatcacaacaaactgtctttcagaccacaatgcaatcaaattagaactcaggattaagaaactcactaaaaactacacaactacatggaaactgaacaacctgctcctaagtgactactgggtacataacgaaatgaaggcagaaataaagatattctttgaaaccaatgagaacaaagacataacgtaccagaatctctgggacacatttaaatcagtgtgtagagggaaatttatagcactaaatgcccacaagagaaagcagaaaagatctaaaatcgacaccctaacatcacaattaaaagaactagagaagcaagagcaaacacattgaaaagctagcagaaggaaagaaataactaagatcagagcagaactgaacgagatagagacaaaaaaacccttcaaaaaatcaatgaatccaggagctgattttttgaaaagatcaacaaaatagatagattgctagcaagactaatgaagaaaagagagaagaatcaaatagacgcaataaaaaatgataaaggggatatcaccaccgttcccacagaaatacaaactactatcagagaatactataaacacctctatgcaaataaactagaaaatttagaagaaatggataaattcctggacacatacaccctcccaagactaaaccaggaagaagtcgaatccctgaatagatcaataacaagttctgaaattgaggcaataattaatagcctaccaaccaaaaaaagtccaggaccagacagattcacagccaaattctaccagaggtacaaaaaggagatggtaccatttcttctgaaactattccaatcaatagaaaaggagggaatcctccctaactcattttatgaggccagcatcatcctgataccaaagcctggcagagacacaacaaaaaaagagaattttagaccaatattcctaatgaacatcgatgagaaaatcctcaataaaatactggcaaaccaaatccagcaacacatcaaaaagcttatgcgccaagatcaagttggcttcatccttgggatgcaaggctggttcagcatacacaaatcaatatacgtaattcatcacataaacaaaaccaaagacaaaaatcacacgattatgtcactagatgcagaaaaggccttcgacaaaattcaacagcctttcatgctaaaaactctcaataaactagctattgatggaacgtatctcaaaataataagagctatttatgacaaacccacagccaatatcatactgaatgggcaaaaactgaaagcattccctttgaaaactggcacaagacagggatgcctctctcaccactcctactcaacatagtgttggaagttctggccaggacaataaggcaagggaaagaaataaagggtattcaattaggaaaagaggatgtcaaattgtccctgttttcagatgacatgattgtatatttggaaaaccccatcatctcagccccaaatctccttaagctgataagcagcttcagcaaagtctcaggatataaaataatgtgcaaaaatcacaagcattcctatacaccaataacagacaaacagagagccaaatcatgagtgaactcccattcacaattgctacaaagagaataaaatatctaggaatccaacttacaagggttgtaaaggacctcttcaaggagaattacaaaccactgcccaacgaaataaaagaggacacaaacaaatggaagaacattccatgctcatggatgggaggaatcaatattgtgaaaatggccatactgcccaaggtaatttatagattcaatgccatccccatcaagctaccaatgactttcttcacagaattggagaaaactactttaaagttcatctggaaccaaaaaagagcctgcattgccaagacaatcctaagcaaaaagagcaaagctggaggcatcatgctacctgacttcaaactatactacaaggctacagtaaccaaaacagcatggtactggtaccaaaacagagatatagaccaatggaatagaacagaggcctcagaaataacaccacacatctacaatcatttgatctttgacaaacctgacaaaaacaagcaatggggaaaggattccctatttaataaatggtgctgggaaaactggctagccatatgtagaaagctgaaactggatcctttccttaaatcttatacaaaaattaattcaagatggattaaagacttaaatgttagacctaaaaccataaaagccctataagaaaacctaggcaatatgattcaggacataggcatgggcaaggactttatgactaaaacaccaaaagcaatggcaacaaaagccaagatagacaaatgggatctaattaaactaaagagcttctgcacaacaaaagaaactgtcatcagattgaacaggcgacctacagaatgggagaaaatttttacaatctacccgtctgacaaagggctgatatccagaatctacaaagaacttaaacaaatttacaagaaaaaatcaaacaaccccatcaaaaagtgggcaaaggatatgaacagacacttttcaaaagaagacatttatgcagccaagagacacatgaaaaaatgctcatcatcactggtcatcagagaaatgcaaatcaaaaccacaatgagataccatctcacactggttagaaaggcgattgttaaaaagtcaagaaacaataggtgctgcagaggatgtggagaaataggaatgcttttacactgttggtgggagtgtaaactagttcaaccattgtggaagacagtgtggcaattcctcaaggatctagaactagaaataccatttgacccagccatcccactactgggtatatacccaaagggttataaatcatgctactatgaagacacatgcacacgtatgtttattgcagcactattcacaacagcaaagacttggaaccaacccaaatgtccatcaatgatagacgggattaagaaaatgtggcacatatacaccatggaatactatgcagccataaaaaacgatgagttcatgtcctttgtagggacatggatgaagctggaaaccatcattctgagcaaactattgtaaggacagaaaaccaaacactgcatattctcactcataggtgggaattgaacaatgagaacacttggacacagggcagggaacatcacacaccagggcctgtcatggggtggggggctgggggagggatagcattaggagaaatacctaatgtaaatgactaattaattggtgcagcaaaccaacatggcacatgtatacatatgtaagaaatctgcacattgtgcacatgtaccctagaacttaaagtataatttaaaaaaaaaagaaaagaaaagaatggaaggtatgagcaagatatgagctttcttggcaggcacagtggctcaagcctgtaatcccagcactttgggaggccgaggcgggcagatcacttgaggttaggagttccagaccagcctggcctacatggtgaaacccagtctgtactaaaaatacaaaagtagatgggtgtggtagcacatgtttgtaatccccgctaccacccgggagcctgaggcaggagaatcacttgaatgaaggcagaggttgcggtgagccaagatcccaccactgcactccagcctgggctacacagtgagactccagtctcaaaaaaagaaaaaccaaaaaaaaagatagctttctaagacagacaaaacaattgaaaaacaaaaaaaaaagggttctatccaacagaagaggttagaactccttccacctacctgaactgctaagtgttaggacagtctcccttaatagaaatctagggttttttctttttttctttttttttttttttgtgacagggtctcgccctgtcgcccaggctggagtgcaatggcgcagtctcagctcactgcaacctctgcctcccaggttcaaaagattctcctgccccagcctccccagtagctgggattataggtgcatgccaccacgcccaacaactttttttgtatgtttaatagagatggagtttcaccatgttggccaggctggtctcaaactcctcacctcgtgatcagcccacctcggcctcccaaagtgctgggattacaggcgtgagccactgttcctggtctagtggttgttcttaatttctttctcatatcctcaagtctcatccatcttcctcccctgccccttacacaaagtttacagagttggctttatgaccagagtccagggccccatatacggaagggccccatgcttggggtttaatgccctgtgatcatagtcttgaaattcttaataattttatctttgagtgtgtgttttgtgtaagtgaaatctaatgagatgatgaggtatgaacccaccttccctggaccggttcttggttcccgctgcccacttccctgctggcaccatgggatcccctcccctcttctgtccagtgcaacctgctaccctctgctcctggtgaaatcctggctacagggagggtcaggatccggtgtgggtgccctgcagtatcttgggtgggcatgacagtggctgccctacctgggctggcagcaccacagccctgttcagcagctgactagttgggcacaccatcccctgccccaccccgaaacaggtagtgtgtggaggtattgcatggaggttgcagtgcgttgagagtcactgttgaatagcaggcctgtgggaaagaaaggtacttgcttggacttcctgcctctcacaggagcatggggcatctggcagtttgtggaaggaggacgctgacaggcaactctcaggcccaagcttgcacaggagcccccagtcgtggaggagcccctgggtgtttctgcactcacctatgctgcttgctgaggggtcattccctcaggctgttccatgtcttggggaccttctctttctccgttcaaatttcctgcctctggcttgtgttagtttcctctggccagctcgaggcaccctctggggttgagcagggaaagacaaattatgtaatctccgtgattctaccttgaagttaaatgctttaatatttgcatttaaaactggcattgtattataaaaagatgaatagtgaaattcatactaacagtttaaaatgttctctttattacaaatgatattaaattgcaataaaaacattatggcaagtctagagagagaaacacacagaagaaaggaaaaagttttatgttctagtaactttaacaggtttcccccatcttttgaataagcagcctcatattgtcattttgtgctgggccttgaaaattatgtatttaattatgtaatgatgtattgcattacttttcatggcaaaaactgcaattacttttacaccaacctaatagttgatcctgaagctgggtactgagaattaggtgctaggtgccagatatccaaatatccaaagcaaaaccccggtcctcatggagattatagactagtggagaaaacaagatcctaatgaagtaataaaataaagaaaagcagaaaaatgaaatatgattcaatttgtgataaatactctcaaagaaacaagcaagttaatgagatagagcctattattattatattattatataatatatacatatatgactaatatattaatgcattaatattcacaaggtatgaatatgttattattcacaagatgccattggaaggagggtctagaagggagaaggaataatattaaatgttataagtaacatttaatggtaataatatttaataagtgctatgtcctaggcattgttcttagcacttaacatgtattaactggtatagcccttgtaataatcctatgagatacgtgttatcgcccatcagcattttactgaggcatagaaaaattaagtgactggcctaaagttacacaccaagtagaggagctgggattcaaacccaagccgttctggccccagagccatcactcttacaaagatgttatctttatccttactgcatctttctcattgcatattgtatttggaatggtttcttcttatcattttaggggtctttttttggtttttaaaaattttaattttattttaatttaatgtatttattttgagacaaggtctccctgtcacccaggctggagtgaagtggcacgaacacagctcactgtagcctctacctactgggatcaagtgatcctcccaccctagcctctcgagtaactgggattataggcacatgcaccacacccatctttcttttatatattttgtacagataaggcttcaccatgttgcccaggctggtcttgaacttctgggctcaagggatctaccctctttggcctcccaaagtgttgtgattacaggcatgagccaccgctcacagctggaatggtttcttaaatatctatatctccaatagactttagctctttgagagaagggacagagttgtactaccattgtcttcccaggccctggtgggtagtaggctttcaataagtgagttgttgaactgttaaattttgaattggattggccttgaatgaaagatcataagattatgaagacatgatcactttactgagctcaagaaacacctcaggtatcaactcctttagtaaggatacacccggctaggtgtggtggtttatgtctgtaatcccagcactttggaaggccgaggcaggcagatcacctgaggttaggagttcaataccagcctggccaacatagagaaactctgtctctactaaaaatacaaaaattcgccaggcgtagtggtgggtgtctgtaatcccagctactggggaggctgaggcaggagaatggcgtgaacccaggaggcggagcttgcagtgagccaagattgtgccactgcactccagcctgggcgacagagcgaaactccgtctcaaaaaaaaaaaaaaaaaaaaagatacaccctttatctgctttaaagaaagagcaaaaagaaaagaaaagacagctgggcgcagtggctcatgcctgtaatcccagcactttggaaggccaaggcgggcagatcgcctgaagttgggagttcgagaccagcctggtcagcatgatgaaaccctgtctttactaaaaatacaaaaattaatcgggtgtggtggcaggcgcctgtaatctcagctactcaggaagccgaggcaggagaatctcttgaacccgtgaggcagaggttgcagtgagctgagatcacgccattgtactccggcctgggcaacagagtgagactccatctcaaaacaaagaaacaaacaaaaacagaaagaggatacatccagaagtaaataaataaatgcttacttgtgagactagaagtatacatgcagacattaattatttacttctgagaacaatattatagtttttgatttaactatattaaaaatatttttggccactgtttcttttgtttgagattcaaaacatacatttctatctttaccccaccacattcactactttgttctgactggaacagtaggatgtgcatttttctgcacttttgactctgtgctccacagcttgtgtggggccaggcccgtggctatgcacttaaacagaagctaacttgagcttctcagtggtgtaattgggaggagcttcagtattctggctgcctccaaaatatctcatctgtctttgcaagattgttctctattatacccagcttaatgtgcatcaatatctctgaaaactagtttgcaatgcacatatgtaacttgttctgaagcatattagcactagcttgttcatcgtttattcattattgagaccagcaggtcttaatagtttgtgtcccctaagggataaggtaggggcaggtgtacagagaggctctaggggcggagaaaggaagccacaggagaatagcagccagggtataaaagattcattatttttctacagttttgcttgggactgcgtctgtcagtagttaaggtatactccatgctaccaagaaaaaaatatcacctaaccgtgaccaataacgttttgtattttatattttgtttgcagagactgtgaatacaacaatatcattctccttcaagggaataaaattttctaaggtattgttcaagatttattttgtactgtctaacctttagcagtaatagacatgttaagcatttgaaacaagcaattcacaacttcttcctttttctttcttttttttttttaaatgggatctcagtctgttacccaggctggagtgcagtggcacgatctctgctcactgcaacctccacccgccaacccccaccccaagcaatcctcctgccttagcctcctgactagctgggactacatgtccatgccacaatgccagctaatgttttgtacttttggaagagacgcggtttcaccatgttgcccaggttggtcttgaattcctgagctcaagcgatccactccgcttagcctcccaaagtgctgggattacaagtatgggcagttgtgcccagctgacaatttcatgaatagcagttcgagattaagatgttcagggttttttctttcacttttatttagaattagctttttttttttttttttaactgagtcttgctctgttgcccaggctggagtgaagtgtgttctggactcactgcaacttccgcctcccaggttcaggtgattctgtgcctcaaccacccgagtagctgggattacaggcacatgccactatgcccagctaatttttttatttttagtagagatggggtttcaccatgttgcccaggctggtctcaaactcctggcctcatgtgatccacccacctttgttcctggaccaaactgagggtcgggctgccatttctcgcagcccaatagcaagatgcagatgaactggggaggaagagagcttttatttctgtaactggttacagggagaaggtctggaaattatcgccagaccaactcaaaattacaaagttttcagagcttatatacattctaaggtatatgtctatgtgtaagtgtgcattcatctgaagacacaagtgattaacttcttttaatctataattaaggtctgagtcctgaagaccttcatctggagcctcaggaactttacttaatctaaatgggtctgggtgctggggtgattacctttatcttgtctcctgctaaatcatggaggtttgaggagttccttcagacccccagtaaacttggttgtggaagcctggggagtttcttcggacccacaataaaactcgattgatcctaaatgggtcctattaagaatttcttagttattttgttatggtttaagaaagccttaaaggaagggcctgggcaaaactcctgatgggcttttgttacatcccatcctttgcataagggcgctggctttaaatatttaacttaaccactcagtactgaaacagttgttagtgagacctggccttggcctcccaaactgctgggattataggtgtgagccaccacacccagccttagtattaggtcttttggtattttttctttctgtagactatggaaaaattgcacaaaacatagcatttttttccgcttcatttttttttccctctaacatacatgggcaaaagtaatttgaatgcaagtgctcattactaatctgttgaacagtcttcagatgaaagcactggatgaccattgtgtataagccagtaaatctctataactattcatgtaaatataatgtgaacattgtttaggagaataaaaatcacataaattacagactttttttgttcaagatttttttgggaacttagtctggtcatccatgcctttgtaaaaataattgctgcctcaatgaataataccattgtgattctagatatttgcgtgacatatctagtaatgagattttatgcattttacttatggtgaccattttaaaataaaatttaataatgcatattctttcattattttgttataaactaatatctaatatttcaaaacctcttaggttagtttttaaaaataacataatcttataattgggaaataaatgggctttatgctcatttaattcaaagacatggaaaatttcgtctcattggaaaactataaaatcaatccaatttaaatggctttctgctagtaagagaaagttcttacaaagcctctgaaatagtagcatctaacattttgtattacttgtatttcttatacttcattttagggaaaatacaaatgtgttgttgaagctatttctgggagcccagaagaaatgctcttttgcttggagtttgtcatcctacaccaacctaattcaaattagaataaattgagtatttaaaaaaaaatttaaagg

SEQ ID NO: 158 - DNA, 72872 bp, Homo sapiens
agagaggctggcggcagtggtggctctcccggctgggttgtcagtcagtgagaggagggggaagatggctcaccgggacccgttctgctaggaagaaggggagcaggtggtgctgctactcgggaggaagcagagcagcctccgtcgctgtcgctgagagcctcacgagtcgaggtcctgcaggtggagctccggcagccgccctggtgagtccagccgagagacccacgccgggcccccagggcgtccggcaacggataacttttttttgtcagggaggagccggggcgaggcggcggcgaggacaggaccgggactttgtccctggggccgcggctccactgggggtaacggctcccgcgcgaggcgccatgggtgggtgcgaggcggcgcggggcgctgggggcggctggcgggcgggtgggctgcggccggcgctgctcgccccgaagttgggcgcagcctgcccgctgcctggagggcggcagctttgtgcgcgcgactcgggtctttccttcccggcgaggagcagtccagcctcctgctgtgacccgggtgccgccgcctcggccccaccggccgcccctctgccgggtgggcctggggcgggagccccccgtcccctccctgccgcggcggatgctctggcctctgcctcctctcccactcgcgccctctacttcggcgaggccgccactgtccgtccggtctggtggccacaatggtcactgtcgaccccccgccctcgccccctggagagcagcgttggcccgagtcggtctttggtcccctgcagggcggagaggttcagacagcagccacgcttccttccttggttatttcgctgaagatctcttcttgagcccttgccccttctttctatgagttattcctctcctgaggctcattttaacatactcgggaatcctcgggggtttggctgaaaatggttgcattaaaacacccccaagtttgtacgcttccccgaaatttgctgtctgcccgtcagcttgcacatgtgtgctttgtgagtttagacattcctgaaagattttaattttgcctaagtggtttagtactgcacagaatctgctctctgagaaatacactatcacaagcctggcagccgcggcgctcttcaggtagggggaatttgttccaccggcagctacttcttatctcagagactgccctacaggcagtagggccaagctgaccttttgcaaattatttatccttggatcacacagtagtttttggagcaggtgggccacctctttggttcatgtaacactttacagtttgaggttttcagctttcaaatcttattgccataaagtcagaaagactgggaggcttgttttccatgaaaacattctactgctaacatccacaggcaccccacctcccccgacatttccaagtatttttttttctttaggtgaatacattttaaggtttacaggatgaatagtagtctaaaccaccatatttttgaagtgcaggcaaagacaaggaaggaaaaacatttaagatctgcttggccaatagtggcttcaaagtcagctattcaaataatcagttcaatcaaaccaagtggcaagggggaaaagcatcacatatttaggaaacaaattctggatttggctcgtttatccttattcgatttattgaaattaccatgagggattagaaggattagaaaccttcttagtcatcggcattagcagtacctggatacagacacccgataaggcattagctgggtcagcgtttatccttgctctgcttcctttcattgttgtatttctgttttatgaaatttgctctgggttgtattttttagactggtgtctttgacggtgagtttaaatatatgtactgttttattcagcatcctgttgcctaatatttattttataatggatcttaagaaattttaagaaatcttagtattcaagacctattttggggtatcgtttatattttataaatgattgaaattatatcaaacataaatttattttttcactcttccaggctgagtaggtactagggatacagaaatgaatgtcatagctcttgtcttcaaggaatttactatctaacatacaagatgttagtaacattacagtaaattaacaattataatactatgtagtcagtgggaatagagatatgcctagtgtagtaggagagtttagagtaggagatagttaacttgccttgagtgtaggtggagttgggagcacacagccaagttgtgaaggatgatatgattttgccaagtgcaggaggtaagtaacttcccaagaggaggatatagtaattgagaaggcaaggaggcctgagaaactgtggcaatttagataagtcattgacaatgacgagtcagtgtcaattgacattggcagttgacaaagtcaataacattgacattgatatggcttgaatgcaggggttagtaggaaatggtgccagatgaagatagtgagggtggtagagggccagatcagggaatggtatccttagctaaagggattggattgaacgtgatagatgagaagccatttattggatttgtattttagacctttactgtggcagagtgagggaaaaactaacaagtcctaatcacctatgagaagaaaggaggactcaggactgtgaaggtttgacttggggttctgttgatggaaatgaggaacacaaaaatggaaggaagatgataaattctgttttggctattttgaatttgaggaagcagtggaacttcaggcgaagatatagatagatgtttgtatctgtggatgtgaaaatcaggattagagagatgattgggggttgaattgaagctatattgatttagttgtgatgaaatgactcagggaaagcctttagcctggtgaaagtggcagccagagaacagactctcataaatagcagaagtaggaagaagaattgtctgaaagttagaggaatagtagctagcaaggtaggaggaccatcaggaaagatgccaagggcggggagattttccagtggaggaggaacaggttaacaattttgaatgctgtaaggaggtgtcaagttaggagagggccccagtgaccactgaatttgtcaggagtccataggtaactttaacaagaacagttttaactgagtggtggttcagaaaccaggcttcagaagattgagaaagaatgggtgtgataaagtagacatgcttaagtgagacttttcaagagaactgaaataaagaagggagaaaatgatagctatagctttcattgagtagtggttctcaatcttggctgtgcatttacaataatgtaataataatttacaataatctcaggaactttaaagaattttgttttccagagggaatccctataccaatttggtgtgggggggtgttgaacccagatatcaatatttatttcaacagcttttctattgaagtgtaattgacatatagtatactacatatatttaaagtgtacaatttgatatttgacatatgtttatacctgcaaaaccatcaccataatcaaaataatattcacctccaaaagtttcctgtgtgcctttataatcttttcctcttatccccaggaaaccactgtctactttgtgtcattattgattacttgcattgatacttttttatagtttcttaagtaattccagtgtgcagccatggttgaaaaccattgcagagtgatattgtttgagggaatgttatgtttgtttgtttacatgcataaggaaagagtgagtagagacaagtaggaagagattcttaagcaattcaggaaatgagataattattggaactaagaccctgaggagatagaagtgaatggaattcagagctttggctagtaagaaaggaagacattcctggaagcaacatctctaagaatataatgttaaagacagtatatttctttgttatcatcatcaaagttggcatatagtatccaaattggttccctgaagtacttctgaagtactttaaaaaattagagagcatcttaatattgtgaaaatggatacccctcagaacaattccttaaatggagcctgagatccctggcatcatcatgtaatgctttgtcattttttggaggggagcagatggaattagcagtttgactattgcttattgttgagagccaagtcctgccagagtctttttgcccttctcagagttaggctgcatatctgcactaaggaaaaagaacatttaacacttgaaaatctcctatttaaagtatctttgctcagaagaaatcttgtttgcttgccctttggatatatgccttttaaatacactggaggataaaatcattcctctgtctcctaaatgagacagagaagagttgtgactagaagttctcaaaggctcacattttctatcttgagaaaagtaatacctatcctcacctcaccacctttttttttctttttaaaatttctggctcaggatttggatataggaaaaatctgagtcctgctggttctgaagtccagggcttgttcctcagccttgactcttggctttcatagggggctgaaaacagaatagcttatccaaatattatttggcattgtaacttggtcataaatagagaggaagtgaaaagttttgtctgattgtcttctagagttctgaaaatttctttcattgtgataaagaattaaagtatgattcttttctagagaggaaggcatccctaattttggtgcagcctaaaagagtggaaatatcaatgttagcatgatattggttattattattgtcacagccttattgtaaacattctatagtttcttaattactaatataataatcattgtaggaaatttgaaaaattcaggaaagcataaatggtaaataacacttataatgtctccacccagagatacttatttcctttatgaaatatctattagtgtcctttgtctattataatactggagatttttaaaaactaagttacgagagctctttatgtatacaaactattaggcttttgtcaaattacattgcaaataatttccctagtttgtcatttttatcttaattttgtttttgatgtgaattttctttttaaacagattgctaacattttaatgtgtttaaacctatcaaatttttcttttatgatacctcactacttagaaagggcttgcatttccaaattatgtgactattcacctctgtttccttatattaatttcacagtttttaaaaaaatttacatctttagtctatttgcagtgtattttaatgtagagtgatggttcagttattttaatgctgtttattgaacagttatcgtcttcagaggttttaaataccaaatcatgtgtgtatactctgtctgtctatagatatggatatatgactttttctaggtttttctatttagtttaattgggctatttctttttgctctagtaattccaaactgtcttaattattgtgagtttttaatgtatttcactaaatggttttgtgaatacttattattgtctttgtcaaaacattttcagtatttctcatgtatttctttattcatgttacattaaaggcagttaggatcctaaaagaacctcactggaatatctgagttaattttctagagaaagttgtactatctctattaatacaatgttatcatttattgaagtcatcttttatgactcaaagatgtagttttgagttttcttcatgtattttatagtttgtagttttcttcatgtgggttctgcccatttttcaagtggtatatttgatattttaaaacttattgattctattgggaatggaactcttaaaattattttataaagaggattaagtgtacctgatggaacatagaaagatggctaattctcgtatactgttttctaactggtcattttatgaaactcttaattctgatagtttttattgtgttttgtagtaactaaattatagcatgtgtaaagcgcgtgaatgattttgtcttcttgctaacacttaatccttatttctttttcttaggacattgatcagaacttctagaataatattaagttatagcagtgaacagtgaggatccttggcttatttctcatttaaatggaaatgcctttagggtttcacagttgtgtgttcaaaatttttatttatggtatgttaaggaaatagtcttctatgccttttcagggggaaccaagatagatattcagtttgatcacatgccctcttaatgtaccttgagatgatcatatggttttccttcttttacctattggttgatgaattgtgttagatttccaagtagctttcatcaaacagttgctgttttagggataaaggcaacttgataatagcatatctctttaaaatagtgctatatttgatttgctatatgagattgatctttagtattccttttgtattacctttttaaggttttgatttctgaatatgccagctttgtaaaaagagagactgagagagaagctttccatgtttccatttttgcatgtgctctggcaattaatctcttccttggaagatttgaaatagattggctctaaaaatgtctaggtctttttggactgaatacaattataaagatcttaatatgtgcttgtgtactaagtattttgcataattaatttcatttagtccctatataactttgtgaggtgaagattattatttctattctacagataaactgagactcagaggttaagacagtcgtccaccatcaataaagtacacaaagtttaaactcaatttctatctgatgtaatagcccatgttttctaatcagtaccgtaatgtttttcttaattaggactctttcttcaccccatattactgagaagtaaatttaatcattttatttgagcatcttattaagtatttttcctctttgcacacttagttttaatttttggtaaccctgttatattatcactgttctgttctgtgttgatgtgtcatcttttgctattttaataaatactgtgatcttggagtgaggtgggatagggtgggggaacttaaaattgttgttcatataatgcacttaatataatttacattttaattcgttgagtgttcaagatcaatttgcattcctgaatcttgtttgtaccttgtaagaatgttatgttaagtgtaccacatacaagagatcaaagagttttggaaacacagtacttttccattttagtttgaattatttttgttgtgagccttgcatcagggtagctttttagtagtaatgttaagtgatatatgtttggtgtgcgttttcttgaacaaagagtcttttcatagttgacaaacattagttgctttctcatataaatacatagaattcagtcatttgtacttgacttaatgaaaacataatatatgagttattaaactgtaccatgaagattaggttttagctactggaatatttatatttactattatgttgagtgatgtataggcttggaaatttaagagaataatgtaagccttaaaagtgcttaaattggccgggtgcggtggctcatgcctgtaatcccagcactttgggaggccgaggtgggtggatcacgaggtcaagagatcgagaccatcctggctaacatggtgaaaccccatctctactaaaaatacaaaataattagccaggtgtggtggcaggcgcctgtagtcgcagctacttgggaggctgaggcgggagaatggcatgaacctgggaggcagagcttgcagtgagccaagattgtgccactgcactccagcctgggccacagagcgagactccatctcaaagaaaaaaaaaagtgcttaaattgggaaagcagtcataaactctatatttatctttttgaactcttctgttccctccctttaaatataaattaacatttaattaattcagttagggttttggttataatcagcacacccagactgcactccccattcccttcctatggggacaatctgaccctcttaaacctgccagacacatgcatgctcttttgttctaaatttcaaggttcctgctgatttgttaatcagtatatgtcacagtagtggacaaggtgacaaatagcccccgcagcagtgtacacattagtagttaagaaaagggagagactgttttggaaaatcatgaaacttcaagtgagtcctgatagggaaatggagaggaaggtgaaaatattatagaaatggatgggggaagaagggaagataaaaatgtgtaaatcaaatagattgttggagaaatatagaaaattggaagaatggttacatgggtggtagaaccagaatattcaagtcagtgaggtcaagaagtagagtttcagaaaggaagactcttgcttcaggttacagaagaacaaccaccatagagaaagagctgatagagttgtcatttataaggtcatggagagtagatgatgagacccaaatttatactgtaaaaggggttaaggaataaattgatggtgagcagctggaagtgctggtagtagattaagctactaaatcagaaagttaatcagtgaagagtaaataaggatggagtaactagggcattagaatctgatgaagccttactcctgtgccccctcttttcagaactataagatcataaaatacattctcaattgtccaaatgattaatattttgttagtgatacttagaggtatcattcattgagtaccttttgtttgccagtgctttatttgcattatttttaatccttaaaacatccctaaaagacagatgttattatctatcattcacagttgaggaaactgggacttagaaagtttaagtaacttgttgaaaattggcccgggttttttggactccagagtcagcattcttttcattatgccatgttgcttcctttatttattgagctatattaaaacactgggggcttataagaggaatataggtgggattcctctgcttgtagaaagtagtagaagaggccgggcgccgtggctttcacctttaatcccagcactttgggaggccaaggcgggcggatcgcgaggtcaggagatcgagaccatcctgactaacacggtgaaaccctgtctctactaaaaatacaaaaaattagccgggcatggtggcacgtgcttgtagtcccagctactcaggaggctgaggcaggagaatcgcttgaacccgggaggcactggttgcagtgagccaagattgcaccattgcactccagcctgagcgacacagtgagactccctctcaaaaacaaaacgaaacaaaaaaagcagtagaagagaaatcctaattatgcttgctgtaatttgtgttgactatatttttatttaaaatgtttttataaagggaatccttctagtaagcttccctactatacttataatatctaatttttaacaattgctgttatttggagatgagattttttttttacccatgataatgatgggttgagaggaaaggaaggacaggccaagaaaaagcatgtaaagaaaaataagactaaaactttttgttttcactatgagaacatcaaatatgtcatacaattttaggttgcacctcagaaaggccagcctcttcatggaaatcatattgagctagtcacaagatggtaattaaagcagatgctctccatgtcaccagattatagagctccaaagaatttattgtaatacagtgtgatttactgaatttaggtttcatcaatcaggaattagttattggtgaaagggtctaagcagatgtttggtttttctataataaaccctttcttcaaaaacaatgtgtaattgaaaaagaaatgcttaaaatactttagggattaaacaatcttataggactttcaattactttgggaggaaccaagatagaaatttttgctctgctaattttagcctcacattcagctacaaaacaacgtctaggttacattctgctatactagtataagacagtattattgaaaactttatcttaaaaataattttatatttcagcctctgctaaaacaaattgactcttagcccagttaatatgaatcagcatggtcatactgaactatttatttctgctttggttactataatgtttttaaaccaagaaaaacaactatattcataatatccacatagtttctgattggggagaatcaaatagaattttgtacagtcaagatctgttgtttttattattatggccctattagcacacattaccaccattaactgtgtttacttacattttctcattgcacttccctctttgccctactattttctgttgaacatctgagcctctattggcagacctcattaaaggctgaaagtctcattccaacatattaaagggcagcgactccctctaagacattaactcccaacttagttggaatttgattctcttaacatttctgtctttctttgtccccaacattgtaaaaaggaaagcacttagaatgcaaagaactttaaggaatcaaagtagagctgtgctttggaaaccatatttccatatgctgttatgtttgggagagaggaaagaggggttattgatagcaaaatgattgaaagataatgtttacattgggctttcttttacattcctcctcattttttctcatagcatttatttattttattttattgtttatattctgatttaccttgatttgttttaaaaggacttaaggcacactcatttctgctgttttaggtttatttgtctctcctaatagactgtgaatcccctaagtcagctatgtcgtattcatttttgtaaatctagtatctaggacatagttggcatttaatagtttatgaataaatggatgatatttaaccaccttaatataagaaaaaaaaagagccaggctggttgctgaaccctagcttactgcagctttagtggtattatgggctgcattgtgtcccatccaaaattcataagttgaaggcctaacccccagtacctcagaatgtagcatcatttggaaatagggtctttagagaggcagttaagttaaaatgaggtaattaggatgggtcctaattcagtatgattggtgtccttgtaagaacaggaaatttggataggctgtatagaaggaggacaatgtgaagacatagggagaagaccgccatctataagccatagggagtgacctgaaactattctctcagagctctaaaaaggaaccaaccctcctgaatcttgatcttagactcctagcctagagaactgtgagaaaataaatttctgttgtttaagccacccagtctgtggtactttgttacggcagccctagcaaacaaatataggtggcttttatacttggatgtagcaaaatctcaaatacccttaatttgcctgttcccaagaaatagtttgccaaggctaatgtcaaagcctcaaaaatttatatacttcccctaggtaaaacatggaagagaaaaatttggatagcttaatgaagaaagtaataactatttgcctcctccttcacctttcccaatacagccaatggcaagcaactggctaattccttaatttaattgaatttgtttagtttggcaaggagaaagtgtttacagggtatttgtgttcctaggtgttcaagagcctctccctggttgcttcttcatggtagaaaatggaaggggaagactaaataaaatactttttaatatgatgttgatttgagctaattgcttgtgtataatcttagtcacattattttacttgtgttatagtcaacaggggcaaaacagtatatcttttacatgcccattgctgtggtagttgctgtaccctttgatcatcaactagtcatactgagttgccacagtggtttttcagcatttttcattacatgctgtagccgcaaactatatgtatatatatatatatatatatatatatatatatatatatacaatttttaccattatttcttcttgacaattttaattgagttgtatatcaagtagtgctgtgttcagtcaatttttatagtgctttgagatgctttgtgaagagaaaatttcaaacatatacaaaagcaaaacatttgctctttcatcgtttggaggcagttttcccagagttctgaaagtagggtaaactaaattagagaactgaacaaaggtctcagccccagaattaaaaaaaaaaaatgtttgccataaagcaaaggaaaccaaaaccaaacagaaaacctctgacttaggggcaaataagaattttggtctaattttggcatttcaacttcagtcacacccatgtttttggatcactcttgttaccagtatgtaggcactgtggtaaataccagttgatagatttttctcatcttttttcttttccttcattccaactgagaaaaatactgcaaccacatgctagcaagtggcagagctgggtctaagtaaattgaatactttttctccagtaccctaccatgttcttttactaccctatagttctcaacctggctgccaaacacaatcatctgaataatttacttttccctagcaatttattttaaaatgaaaatatcctacttttcaatttagaatgaaaatattaggaagaagaaaagagtaaaccagagtaaattatttatgagacaagggaaaggttttgaactgttttaggtgccatgggtagggattgctgatagcatggtgattagaatggggtctttggaattgggctgcatgggttctaaccctaacttaaccactttggtagtgtgtgatcttgggcaagttacttctttaagtgttagctttcttttttgtgaaatagaggttatgttaatttaccagctaggatggctatgagaattcaattaaaattccaataaatcgcttagcatagtgccagaaacataagtgcttgaggaatgttagtcattatcacaacattatctatggacatctaccattgctatgtatgacacatttggtcacattgagtgttttccagaccatattcccaatgatgccagttgtgtatggacagcaaaggatcccatggtcaaatacatttaggaaaatatttcattccaaatgcttttcttagagattaataatacagatttagcatattaaaggctctgaaaagtcctttgataaaaaaaaaaaaaacttctttaactttgtcaagtagttagttaaattttcacaaggaaagccttttttttctgctgtcctccgaggtctgtcttcatgtggcttcttatgcagatgtctatccctcagctcttgtagcatggtggttgccttctaagagggattattcaagaggacaggccctaggtggaagctcttattaagtctctccttgcagcaccttgctaaattccactggcaaaaacatgtcactttgccaattccagcattgatgtggaggaggactatacaaaggactaaataacaggagagatcgtttgttgaaggtcgtaaatataatagtaatagtgtaccacatatttttaaaaaatgtccatgatatattaggtgaaaaataatcaagttttggtagaatgtgattgtatttttatgttaaaatcaaaatataaatggactatgtatacatgtatgtgtatatgtgtatatatacatatgtacatgttttgatagagcagatatattttgtttggttgagcagatatctatatagatatagataggtacctatctatataaatatattatttggttgatatctttttcttggttgaggagatatattttgttttggtttagatatactgctcaatatttttaagagtagagagttttcagaactgctgattatatagcatatgtgtagaaaaaagtttgaaataatataaagttaacagtattttcttttgaagagtgggatagcagcagtgagaaggatgattatttattttaattatgtggaaaagatttaagtgtggccatttaaaaaaatctcccgtaaagaaaaatattagcagggatgggagatcggttttctccctaggtgttgatagtttttgtgtatgttttattttctttcttggtggaatttttataatcttttatagttgcatagtgagcagaacccttgttttaaacttttcattgttgattttgtgtatttctgataattttctcatgatggcccttgcaattattcgtctagaaaatgtaaggtgctaccttgacttattttcctctcgtctattccctgcttttcctttgccatctggattacaattgccttgaggacacagatcatattttactattcttttgctaatggtgcaaactaatagaaacactttgcattatactcagcaggcaatcaagggcttgctgaattattaatgttgcaatttgaacatatactagtattgactttttgcatatacgacctcccattctatgtttgtttttgctacttctgtttctttgctcttactctgactctgcccagcctactgtctggataaattatatgaacgggctgtcgacttgacatcctgttcagtgaatatgtagaaagcatttctaatcaccatgttatttaatatgcaattgtgtgataatcatgttaatgaatgtgattgaggtaattattatagttcagcacttttacactgatctcttaaaatctgttaacataaactttatcatttgtatgttagttatcagggcttactgaagtttgattcactgaggtaatacttgaatcacttagtatgtgctgtaattatattttgtaaaaggtggtgcaaacattttggaaagctttatttcagcaataactgctcttgtagatttttacccaatattaaatgtaaaataatttgtttgtgatatttttatatttagtgaaatacataacatattaatggacttttaagatttcttataacattctaataagaggttttctaagtcaagattatctgcatcaatcagtctttaaaataatcagatgatgctgttttggttcacagatgcagtgccagttctctcctggcagcttaccttgccaatgcatgcatttcattaataagagccccaagtttttcctaggtagggtgtaaaagctgaggagtgaaaggaaggtagagaagagaagcataggcaaagacatggagcctggagtggcatggattattttggagaatagtgttaagtaaaatttggataggtaaattatgaccatattttagggaaagtttgatgtagaagatttgtgaggtctgatgtcatggtgtgttcaggagaaaagaagtttcagcaagattatatggcagcaacatgcatggtgcactggaaaagggaagaaatcaggagccagaaggctgtgtgatcagcagatgcagaggaaataagggcccagactcagggcgttgctgtggagatggagagcagatggtaaatttgacgggcattataaagggtgaaatttattcttctattcaataaatatttattagatacttgctgtatgttacttatgcttatagtatctggactgaaatttgcctgtagttactaatacagtttaaaacttaaaaattatgttatataatttttatttgaaaaaaattttaaaaaatgttgaaccactgagtcatgtgctatgttaatgtcaataagaagtgctcatcgtagtgccatagttcccagagatctcaccattctgtctgctcttatctaaaagaaatctaaattgttaataaattgtacatgatcttagtcaaggctatttgaatgctggctcaaaaaagagggagaatatttgcaatagaaatccaagagcagtaactgttggcctcagaagtttcatagcattctgtttgctgcattcttttggtcaacatggttattaaaaaatagttcttcctaacttctcttattagagtccaaatcagatatcctttccctggaaaaaatgttcttctgaagtcctggaggatcttgtctatgaccataccaccttgaacgtgcctgatcttgtctgaagtcatggaggatctgagaagaacaggaagatagaaatgggaaatgagaagaaagaacttcttaccttctaattgttctagcttttccaacagaaacacactgggctggttgccacagcacactgatatcccaacatgatcttatttgtccttggggtaggcaaaagatggtttagccaaaaaccattttatagagtaaaaacctatgttctattcttgataatcagacacttgttttgtgatttttggggaaaataggcctaagtaataggcctttggaaagacttcccaaacctctcttactatgaattatattacttctcctggtgccttgagaggcagctttatttacttgatgacctaggtaggcagtgaggcatcaacacttctttttaagcaacagcacatatactgtcctccttcacaattgattggtcagtttctaagcagcaaaatcctaaaattaaattaattttattctgtaacataatctgaacatttctctccattctgttttcctgaaattcacccaggaattcttgataatcttctggtagcgcttaatttaactacagcaatggcctcattgcataggagagaagtttaaaatttcgtgatgtgtcacaatccatttatagaaatttggttgctctataaatttatagaaacttaagcttcataatgatatataaaacaaatggttataaaaagttttatagtagtttgtcgttagtgcttaatggtgaaggggatgatgtaaaagataggaataaggaaatttttagagttttacagtgaaagttacaaatacttttaaaatattcttataaaataattaaaatgttatatgtctctgatgacaacactaaaagataaattttggtaattgttattaataacataatgtgggaattgaagaataagacatttgacttagaaaggttttattgtacattgaaaatataaaaaattaatgttatacagacttattgggctagtgaaatactacatagactcctagcaagccttctaatgtaattttaaatattctgctccggaacatgtttggcaaaaataggaagttagttacacagcaggaaacatgtattttaattgtctcttttatctttgagaagaataaagtttttacaaatgcaagtatattttgaatattactagagatgtctaattagatttataaagcttgcagagttatatagtcaagtctttggcatagatgttaataggttacatattatatatgaaatgtgggggtgggttagcaacttgtagagagcctcttgctgcttgctggtagagagaaacagtttttaaatcattttgtggccagtttgctttttgtcctatctaagctttactgatacctttagtcagaactgttactcatcttgaagcccagggctaatggaaagaatttttttttttttttttttttttttttaacaattgtactgtacgtggtaaggacaaagaaaagcttatgtcagctagtaaacactgttggctttttaattttttatttctttaaatacttatcctacaatagtactccaaacctcaccatcacacagtatacccatgtaacaaacctgcacatgtacctcctgaatctaaaataaaagttgaaataaaaaaattatcctatactttatagaattccattattctctttcctacataatgcattgatatttcaggattcatttttaatgtttgtatatttttgcttcttttttttttttttttgagacggagtctcactttgtcatccaggctggagtgcagtggtctgatcctggctcactgaaacctctgcctcccgggttcaagtgattcttctatctcagcctcccaagtacctgggatcacctgcacatgccaccatgcctggctaatttttgtatttttagtacagaggggtttcactgtgttggccagtctttctcaaactcctaacctcaagtgatcctcctgcctcagcctcccaaagtgctgggattacaggcgtgagccaccgcacccagccatactttctcttctaaagatattcttacttttatagttaaaaggaacttaccaggggccaggcacggtggctcatgtctgtaatcattttgaatggtacttgatattcacatgacgtcgtgttgatgttagcttagatcaaggcagtgcttgcccggtttcaccactatacagttactcttttcctctttccgtactctctttttttgcaagtgaatagctatgtccagtgcactctcaatgggggagcaaggactaagctctacctcctggaagagatagtgtctacatctgttactgggaattcttccgtaaggaaactttatctcctattctcttatttatttaatcatttatttatatgagtatggcctcatgtatgtttattttatactttgggttataatgcagtactacattacttgttctgttgcttggattgttccagctttggccattgggtgttctttcaggttggcttaatatttaagagtataaagagtccctaacccaaatgtttgaaaacaggtggtctaggctatgatcatagactttgatcgtaggattgagtagctgaggcagataggaagaaaatattgtaggaggagaattctaggaattaagacttctaggaatttagacttcaggtaagaaaaaaaatcaccaagatttaagcaggagttgtttgaaagcatgacagtgagctaggagctaagatcatccagaaatgaaggggagggaccgagcagggcaagggcgtggggtggattgattgatagatgatggtgatagagtttcaaagcagctttgggtggatggttgaaggaggaagagaatgatcttgagtggtaataagaagaaaggagaacacctactttacctctaagcccagtggtttgtttcagggatgtgtgaggaaatgcaatcactatttggtaagcttgcatgcagggaaactagtgtctcatgaaaagaagaaagcaacatttgaagaactgttgaagatgtagaggattttgctggtaatagactgtaaattccagaggacccatggaagtatatcgtccttccagaattaggatgggatgggagatgggagcaaaacagaagatgtacaaagagttatgatgactagtgtgtgagatgagtgtcatctaggtgtctgtagcttcttgtggtgctggacataaacagagatgaagggaataaagactttagtcctggtggacctaaagcagacagtggtggtgagactgtgaaagtttcaggatagggaggcatgtcatagactcccttttgagttctgcaggagacagagaagtttggggaggaacaattttattctgagcttgcatgcgtgctaaacaagtgagtgtccatgtgagctcagctatacaatgagggctcccatttgatctctatcaagtggaagataagagacccagggctgactggtgttactaatgtataatatacatacagaaaaatgtacagtttatgaaatgtttagcttggcaaattttcaccaaatgtatacacttgagtaaccagcacctagatcaagaaacagactgttatcagaaccgacaagataggcccctcaagagcagccactatcccaacttctaacacaaatggattcgttttatctgttcttgaaatttacataaatgtaattatatagtatgtactctgttttcctgcattcttttatccaacactgtaacacagatatagtttattcattaaaagttatattttgttgtatagaatttcagatattgtacagtatactgtaatttattcgttcaactactgatggacatttggtttgtttctagtttttgactattaaaaaatacctgctgtagccaagcatgtggtacactcctgtagtctcagctacttgagaggctgaggtgggaggaccccttgagcccaggaatttgaggctacagtgagctgtggtagcgccattacactctagcccgggtaacagagtgagactctgtctctaaaaacaaaacaaaaacaaaagcctattgctcagatgaacattttctgaacatagctttcagagaacatatgtcctcatttctgttgagtattaacatgggtagaatttctgggttcgtagagtatatgtatatatcctcaagtttagaggatattgctaaagagttttccaagatattgtaccaatttgcattcacattagctgtgtctgaatattgattgctccatatctttttcaacacttggtgtgatctttcattttagctacacatgcgtacgtgtgtgtgtgtatgtgtgtgtgtgtgtgtgtgtttgtatggtgtatttcactgtgggttttaactgacatttccctgatgactaacaaagttgagcacgtttcatgtgctaagtttccatttgagtaagtgatggtcttgatttcctataggattgtctaccttttttcttaataatttatgagttccttatatattctggatatgagacttttgccatgtatatgaattgcagatatcatctgccaccctatggctttgccttttcattctcctagtggtatcttttggtgagtagaaattcttactttcaaggaagtccagtttatccttttcccctccttgtgattagtgcttttgtgcctcttgtttaagaaacctttgcctagcctaagattatgaaagtactctcttgcattttcttctaaaagccttatggtttactgttcacaattagatctgtggtccaactgaaactgtttttatttttgcatacagcatgatctctagggtcatggttctttttgtcctccccatgtagctatccaaataacctagccccatttattataaagagcatcctttcctcactgaatttcagtgtcatttttgtcataaatcaggtgaccatatatgtgtgggtctgtttctggccactctattctgttccattggttgttttctattcttctgacagtgccaccactggcttaattactatagtttttggtaagttttatactaagctttgctgttggaagtccaggtcccacagttctgttgttcttcaagacagcccttgactgttcttggttccttgtatattcctcttgatttcttttaatttttgaaaaattaaccttaattttaactggagagttattttgaatttttgtaaaaattttacctccccatttctatgtaacttgatgtagtgtggttccatttgtgataactttctgtcctaatttattaaacaatggaattcatacaaaagaaaacttttgtgcatttatattggctttgctttacaaatatacataacaacataaaaaaagtagatacaggcagacagaaaataacagtaagacaaagagaattggttatgaaactcacagtattcataatataaaaacaaacaagttactccaaaggagagattttcctagtactgaaaacttaagatgtgaattttctagactctgttggcttttaaggaggataaatgtcatctagcagtgctttggtaacattttggacataatttcaaagcccagtttctccaaacagacagttctataaaatcaataatacagtacatatatgtggttttctgttagtctgacttgatccaaggagaaatattttttattttaaaaataaaatgcgtattacccaagtaatcttttatgagtgaatgaatgaatgaatgaccaaaaaatgttttaatcatgtttttttatgagaattagacagcaggaaccttagaatgtattctttgacaagaacctgcgttgttcattaaggcatatctggatactttcgtagacagctgagcagagtttataagaattaataataataataatattgcatagtgataatagtttgttgccaggaatggaaataactgcttttatttgcattttaaaatgtactcctcacaataactccttgcaaataggtactgtcattatccctattttgcagattaaaaaaaagtaaggcaaatatatcttacccaagtaagtaatagaatcagaattcatttctggctactctacctaagtttctactaccttataatgctgatgaaaattaagtagcttaatgaaggatttgtgactgaatttggaagttaggaaattcagatagagctcaagttttccgtcaggaaatagtttccaagtctactcccatacaaatggataggtaaagaaaaatacgttgtattttgacaaacattttgcttgagataaaactgttctgcatttcctttagcttacttctttaaatttatacttaagtaaatcccagtcttctgcatcactgttgtcaaatatggtcattttgaatattgtcacttttactttttaaaaaatgaacattacactttcaagaaaccacatggcttgcctagttactgttgtaaagaactgaaatataagcaaattaaattactttaatgctttctataaagtcaattttggatgcgtgtcttcttatattttcacaattttgaaatattttctgctttcttttaagataaatgatctttttgaaattattttattgaaactagggaaaaatgtccaatatgttttgcagctggcattcctgaaaactaaatgaaaattggagagccaatttcatcatgttatgatatttatacttttgtcaaaattcttgcattttaaggcttgtttgtgcacattggttttgaaatgaatttagtaatttatgtttgaaactcatttcacaaatatgaagtaaaaactttataggattatctctgttcatagtaatctgactaaataaaatatattcaaaacgttaacatttttctatgttaattttcaggttgaaggtttagaacagatgtggaaaaatgtttacttcagagaaaggggttgtggaggaatggttgtcagagtttaaggtaatatttactgttctactatagtaattatattccaaggaagttttgtctggcgtttaaattccagtgatttttgtattttatatgactgaaaggctaaatatctgtggaagtattttctatcaaatctcaatagagagttatttacacatagtaatcttttctaggaaattgattccttttttcccccaagtggttcaaagagtttattcatttgtttattttctttctttcatggcaataccacaaagtagttaaagtctctgaatgttgatgtcattctccagcgaccatcagtgattcattgtcaaaatgtttcttccagtttggagggcagtggaactggggtgaccaacaatgaggagaggatgggaagatatttgctcaactttataccagtgaatctttctctagttggctaacccagtggctatataaggggtgtatgacctttgattagttaatgaagaaaataaaacatattttcttgtctcatgagcttttctctaggatagctaaaatagtatttctttaatcagctaattacttttctctgtccttatgtgacacataattatgtgcacttgcatgatcatgaaccacaggaatgaagagtttgggctgcaactatcagtttgattttgtccagcccagtcagcccaagacctataaggacaaagttacagtctgacaaagtcaggcttattggcttgttgcattgagagagattgcccaacagacaccatgggaccatctcaccaaaccaaagaaaagataaaattatagtaatttggaggaagggtagagtttaggtgaaatttaaatgaaacggtattctggtagactcaaaacaaagcagggctatttataatggggtgaacatctggtctggccttcaaagtagacccaggatcttgttgtcttgaaaactacaaagttaatgtagatttgaaatgttatgttcagaaactccatatttatatctctgcacctgggttgaaaatcaaggctgcttctctatgtcaaagtgacttcgatgctctaggcaagagtgggatgttttgttcttactgatacatgttcaacaacaaacttttttataatctgtgattttagataacaagtcatcttagtaagtaagaacttagtagtcactcaaagaaggagattgttatgacatttttcagttgcagtgtgtatttaggaaaagcaccgtttcctgttaattttaatagctggccttatctgtctcttttatctaatcctgatgaatagctgggcagacttttactttctcagcttttatagccatgaattgagcatccttctatggattccccaagtcatcatgaagtgacattagaatgttacagaagtgctttctacatattttaataacttgtggccagatgaggtggcttatgcctgtaatcccagcactttgagaggcagagatggaaggattgcttcaggccaggagtttaagaccagcctaggcaacacagcaagaccccctctctccaaaaaaaaaaaataaataaataaattagctgggcgtgttggtgcatgcctgtagccccagctacttgggaggctgagttgggaggaacacttgagcccaggaattcaaagttgcagtgagctatggtggcaccactgctgtccagtctggtgacagaatgagacttttgtctctgaaagaaaacaaaacaaaacaaaaaactttgattaaatcttgtgtgtgtgtgtgtgtgtgtgtgtgtgtgtgtgtgtgtttcctgcttgtgttatctttgtgattaaaatagtctgttatcacggcttttttttggcagattgatggaaatagtcaagtttaacagttgaatgctatttcttctagggcattcttatgttaatgatgaagtaaaatatgcaaaagcaaatgtcgacagctatccattctttaagatgggagttgtggaaagagagcatgttaaagggtgggttgtaggggtgagatcagctagtaaggtaaaaaatggaaaaccatgactgatctccttccctttccatctgtttgtttattcccttcccctcctggtttggatatatagacacctaggaagtgcagtaccgaggagtgaggggcagagcagcggttaacagcagtagtgtctgaggaagtaggtggttggggtgaagggctgcagaggtggcgtgtagaagaatagccagagtagttacattggtagattggttacattgagcaaataagttgattgaagaaataagtaaatattttgaggataatgggagttagatttctatctgtctgaaaaaggaattacaatcatggaacagcgaaagccaagaaagaactctaaggtgttgtgttggaatcattatgaactcatgggttctaagtatgcatatgatacatatgtgtgtatgtatctgtacatgtatgcatgcatatatctcctagctttgttcactgggaggacctagaaacaatggcaccctggtcgcagtgagtacactaagctcccagatcttgttttccaaataccatcttccactacaagaaaccagagtatgaataaataggaaatattatttaagtaatattttatcaatataacatattatgtgggtaacaatattttattaacatttttcataaatttaatgcaagcatagggaaacttttcctttaggaggagagagtgaatcatggcctgcaggaaataaaatgtagtttaagtagtttctcctgcccaaccccaagattaactttacccaattttgaatcaatttgatattcaaatgttttaaattatcttcaaatctgtattatagccagttcaaggagggatatttcccattccttggttaatttggtaggcattcctgataattatttggagtgttattctaaattgggttaatgtgtgttgtattcagctctatgtttgacaaagagaagaaggttatcaggcaaaatcagcagcataccagaggtaatagaatatagaaaagtgcttgggaacatgtctgctaagtacttttaaaattagagtaacgtatctcttgaaatctctggtgttaaattacatatttttgttaaaatatttaagaaaggttttggttacatacatatttctagaaaagcttctgcttgattgttttatttaataaccatgatgctaataaggccaagtcatcatgattgagtaagtgaactgaaagaaaccctttgacttaattctaattctccccaagctggttttatgatgttgggcataacctctccgggtctcatattttcatcagaaaagttaaagtactgtaagtggtttatgaagatgatttttagctctacactgttgcacagtcagtctgaactcctaacctcacccaacatctctcagatgtgtagagatgaaatttttgaaattgaaaatttggtaaaattattcattgtctgctctagctatggactctcattagtattttctttttttaaaatttgagacagggtctcacactgtcacccaagctggagtgcagtggcacagtcttggctcactgcaacctccacctcctgggttcaagtgattctcatgcctcagccttctgagtagctgggattacaggtgtgcaccaccatgcccagctaatttttgtatttttattagagctggggtcttgccgtgttagcgaggctggtctcgaactcctggcctcaagttatccgcttgccttggcctcccaaatgtgttgggattacaggcgtgagccaccgcgcttgtcctattttctttatgtaccaactaaatgattagtctaggacttcattattttaagatttcatgaatagttcaagctctatcttttcaaagatttacttataaaatattatctttcagattgtgttatttttgttactgctgtgtggtagatttatctagcagatttccagactcctgatttttttaaattttctgatagttgctgaatctcaatatgtgactcaaaatcaaatcttatgtgtgatgttgttgaataggattgttttaattactggttcttcacccatctgtccatcttcattaattctctgctactcaacccctatcacctccttacatttttgaaaaaccatctgtcaaatgatactttagtatgaggcatctgtcttcaaattttgttgttgttgttgttgttttttgagacagagtctcgttctgttgcccaggccggagtgcagtggcactttctcagctcactgcaacctctgcctcccgggttcaagcgattctcctgcctcagcctcccgagtagctgggactacaggtgcgtggcaccacacacctggctaatttttgtatttttactaaagacggggtttcaccatgttggccaggctgatctttaactcctgacctcgtgatccacctgcctcaggctcccaaaatgctgggattacaggcgtgagccatcgcgcccagcgtcaaattttgccaagaataatataccaacataattttccattaggtgcttttcaactccagttatgccttctgaaatgtgagaaagctaagctagtatttaagaaggtcactacctttgaactagtacagtgtgagaaaatttaaatgtttttgctataatagtatttaaattcatttggctcctttagatcttgttttttaaaacaccattcatgaacacaacattttctccctctctacagacaaaattaacttttcccacattcattaaataaaatgatgacagaattgtgaataaaaggtattattactgcactaatatttaagatacccttcctttcatttatcagtggtagcctgggtccatggtattttccagagcttgtcttttcagacaaacagctgtctttttgcctttgggtgtttcacagaaaatattttacctcgtgacggtcagctagtatataagctgaacattgtaattcatgtttttaatgaatgatctagttttagcctagatgatatatatatatataaagtagtaatctttctattcactaatttttttaaacatttatattttggttcatttattcttcaattttatagttagatatatatgttagacatgtatacacagtatacatagacatgtatacatgtaactatgtatacatagttacatatgttagacatcaatgtgttttaaatatatataatgcattttatatatataaattatatatataatttagatttatttttattcagaggattaggaatctgctgtttatttgactgttattcccttttatataaattcccccagtattaggttactcttgatcaaatgacggaaatggaatgttgcctcgagatcttttgtgtcatacttttgaaatattgaagaatgccttaatctcgtctttatgtaagcagttgcagtaaaacctttttttcccccgtcgggagaattgtgaaaggtttccaaatagtccacatttgcttgcccttctggtaaataaaactctcttattaaacttaaaaaaaattctattcacttatatatcccaaggtgaaatatgacccacttttaaagaatctaccaaagtataagcaatggcaattttcatttcttattttgtttatctataatatgttccctcagcaaagatttgcgtatgagggcctgtggtgagtgctgtggttgcagagatgataagacagttcttgccctcaaggagctcacagtaaagtgaaaatgaatcaaatgtctttattgtaaaaatttatgctgtttaatttatgcacacatccacctatatactaatcataacccatattaaattttgaaatactaggatatgagacatataaggaataatgtatgtttagagtgagttaggaatatcctgagacatggtatctactgcaggattggcaatgactgactgaaggaagtaatttgggtgagagagaataatgacttaggaaacagatatcgctgaggagggggtgtgctccagaaggaaaggtttttatcattatgataatgaaatgtttttattcagatttccctactcttttattcaaaatcatctgacttactactggagttttatctcttcccattactctctggtcatggtgtttgttctgaataggtggttctggcaagctgtgactagttgtctgtattttaaatggcattaggaaaattcgtttgttggtagtgtggatatctttttctctagctctgaaaagtctaaattttcccttcaattggttaagtagaacagccttctcatgctcaaccgtcagagtatgtaactccggagttaatttgaccctgtctcattctgttacccaggctggagtgtaatgctgcaatcatggctctctgcagcgttgacctcccaggctcaagccatcttcccaccttagcttctcgagtagccaagactacaggcatatgccaccatgcccagctaattttgtttgtttttttgtagagacgaggtctcactatattgcccaggctggtcttgaactcctggggtcaatcagtcctcctgcttcagcctcccaaagtgctaggattacaggcatgagacactgcgcctggcctatattcccatctctaatcccaaactatgatcaaagatgaagtgttgatgttagtttatgtccttgttgataagaggataaagtatattttttgttttattttgaatttttgttgagatataattaatataagataaaatttactaatttaaggtaaacatgtttaccttgccttggtttttgatatattcacagtgttgtacaaccaatgccagcatctaattccagcacatttccatcaccccaaaaagaaacttcatacctgttagtcactcctaatcttcttctcccatctgcagtcctggcaacaactaatttactttctgcatctatggatttgcctattctggacatttcataaaagtaaaatgtatttttttaaatttgtttagacattaccagaaacatctttaccaaattatgccacaaatttgaaagacaagagttctttagtttcatctctctataaagttatccaggagccacaaagtgaggtaagtacttttatggtttattgtgctaacagtattgacttgattgatttttaattttttattgtgaaatagatataaaggggtaagaaaatgtatatgtttaaagaacaatactgaaatgaactctagtgtaccattccccaagccaagaaatataatttattaccgtattccagaagccatctctgaacattttctctctttttctctctcgctagaggtagctttgaaaagtctatgtcactgcatttcattttattcattcagcaagtatttgagtgcccattatgagccatcggctatgctaggcagtagagaatcaaattgagtaacacatggtttttatcctgaaagaggaaagtgggagaaaataagtaaacacatggtttcaaggcaatccttaatccagtctacggataagcacaagttttccaggtggcaaggtaaaagaatattccatgcagtggggatagtatacggaggctcagaaaatgcaaggcatttaaagaatggcaaatagtttagcccggctagtgcctttcccagtctttcctcttgccccactaccactctttcttttttcagatggctaatttagattttttttttttttttgagacagggtctcattttgttgcccaggctggagtgcagtggtgtgatcatggctcactgcagccttgacctcccaggttcaagcgatcctcccacctcagcacccccaatagctggtacttcagtcgtgcaccatcacacctggccaatttttgtgtttttggtggagatgggatttcaccatgttgcccaggctggtcccgaactcctgggctcaagcaatccatccacctcagcctcccaaagtgctgggattacaagcatgaggcactgtgcctcactagctgcccatttagtttgaaggtaataaaataatctatattccagattctgctgcttgtaaatcctaccattcatagtagaaatagaaaaaaaattggaaataggatgaaaagtaaaaaggtatggcatttggaaaaaggtgaataggctaatgcagtagttaacaatagagggtaaggctgtgataggagctgaagctagaaagctaggtttaggacataaccatggtgggcctcaaattccatcttaagcagtttagactttttttgcactgaggggttaggaaggtggctatgtggaggatagattggcaaatgaaaagatggggaatgcaagaagactaggaagctatgacaatagcctaggagggagctgttgagaacctaaacttgggcagcgtcaggaggagtggaaagaggtatggtagaagagagggatctgaagtacataattccttttgtacttgagtttgattgatggcatgatagactctaacagcagattcagtggtaaagtaacatatcctggagtccagtccaatatggatctatgtatctctgggatgaaactaccaaaattgagggaggctcttcttttgagtagttaacctcttttggagggggtatagaatatcccactcctactggtaatactataatgcgtatcatgaattttaggtgctgaagggattagggagtatattgacaagccaaaaaactttaactggaataactgaattgaagaatcatatttgtcttgtctcttccttcttcccaaagcttcttaacttgtatagaatgcacaggtaggctgttttcttgaaggattttactttttaaatattgagtgaaagctgttttaaggttttccatgtttggtttagaattatatatttcaccaaatagggtaagtatagccatacgctttatgttttttaacaaatgttgttgatcatttattatttattattttgagaagcttaaaaattattctgtcatgaagtatgttttaactaggctactttggaaagtgtttgtaggataaatttatgattggctagattagtttatagcattccttttattcagataactctagtgaatatagctctaatggttcagagcagtgtttctcaaactactagtgatgatggaccagttttttaaaaaaattatcatctgtcacagacaaatatgtgtatctgaaatacatgactaacatgaactcacaccatgtgtgaggcaccacacaaatttgatattccctaactgatgtatactctgataaatctgctaatcactcacttggatcttgtaacaatattaagttgctataaaagtttataaatatttcctctcaatttctatatttatattgttggagattgataacagtttgtggatgatcctcaggaccacactttccgaagcattggttctggtcttgcatgttagtttcgtgcttttattctggttcatgtggtgaagactgtgtgtattctgtattcttaaaaaaaccactcgctctttcagatatatttggaagtgcttctaaaatataacagtgtaatctactttaacattttaacctcccttttgctgtttagaatattttgtgtctaaatttgaaaatattcctaacaagttgatattattattttccagaatttttgaaatttgagatattgtttctggtattatttgaagtgcaacaaatttggcatttaaacttcactaatagtactttttcattattcagttttattcatttaataaatatttattaaacgcatttaatgtgtcaggaaccacttaggaattatgagaacaaaatagactaaattcttgatcttgtagattaaaacttgttttctagttagtgagaagacattaaacaaataactaaacatataatactatgtcagttagtgataaagctataaggataaataaaatgaagtaagggaaatatgtgttgggactgaggaagttggcgattgaatcaagatccaaacgaattaggagttggggtggaatcaggggcaagagccttccaggagagggaactgtaggtggaaaggccctgcgatatgtgatgtgttcaagaaacttataaagaggcagtttatatgggtacagtgcagtttgcttaagcggcgcttttagttgactataactttgagacaggcctatgagtagaggttgatactacttaagtctgttatgaaatcagctgttttttgaaagacctacataaagtctccttggagttctaggagtcgggagtccagagagtggagaggtccggtaccagtagctgctggttcctgaatagtagtgttctccaacttttccgtatctttttcttacccaatgttcctgagtaattgttcaatacaaaaaattttgcaagattttccttctaaatttaccaaaacttgactcttttcctgcttagtcattaaagaacattttccttacttagtcattaaagaacatttttgagtcatgtgcctgttaccactagaaatctctcttaggatacagacttgttacttatgaatgaattgttgtaaaaatccatttgcagcttagttgtttcagaactcaaaatttattttacaatggagagatgacacatggtgactaggttctcattaaacccataaaagcccatttaacacatataaatatacttgaggtacagtctctcttaataatactgtaaaacctaaccaccataaataatatggtttccatgaaaaaaaaaaaacattaaaaaatgcaacccagacaccaggaacacagcaggttctaatgctcctttgcttgcttcaaatatagtcaagttagatatgtcagacactgtccgtatttcccacactgtatatcattttattcttcctgacatttttcaggtatgttggtaaagaagtcaaaatacctggctccaggtctgacccttgtgagtcatgtgattttggtcatagtggatagcctctttgtcttagtttccttctgtggaaagtgtggataatgatattttaccctccagtgttgtgggaatttaatgggtttatgtatgtgtaagtactttgtaatctgtgacacactatgcagatattgatatttatctgtactaatttcaaatgcataatttcatctaatcttgttgcaatatatttctacctcccctttgaatctgtcttgttatattttcgtatggcaaaaactctaaattttggattttaaatgggttataaagccttttgagtatgttttgattaaaattatgtgttcatacaaactgtcttgaataaaatttcaaataagatttcataattttgcaatgtttgttagactatctcaattgatttagctttctgagggatttagagatgagggagggatgttatgccacaattcaagattattgatgtgggtccgcaaagaaaattttgaaaactccaccctgaaagctaaatatccctaaccagtcattctttcttccagccacctctatccccattccaaattcctacgctaaaaacttttcttgctatctctgaatggcatgactttacctcctgcccctctgtttttctgttatctttccatggccacagtggacatctgttgccctctaaagaccatttcaagagtggagaaagtattccttgtggaagattaactgtcagaagttaggtaatttttcaataggaaagactagtttgacttagtgtttattgaagtataacttttgttataccttttataaacaatattgactttaattatattcagtttacatatttcacttacttgaaatcaaaacatccactgtaaattagtttttgttcattaccattattggttgtagaaaatctgtttagtatatttaaatttgttgccttaggtgaggtatagttcattggatatatataataaatagcctgataatttgcttgaaaaatcagtaccttgtgaacagtaccttgtgaatctcttaacatatttgattatgacttgtgtgcaatcattgtatatgctttaagagaatacttacctataagagggtcttaccttgcctatctgattttttaaagcccattataaagatacagtcagctctattaactggataatgttgagagtgtggtgggagaggaaaaggttgtagatgactccaaattatgtttaaaataaaattacagcaatatttagattatccagggccaattaatcatggttacaatagggttctagatccaggggagtctgtagttatttagcccccctatgtaccaatcattcctgtcagatgctgtcaaattataaactcaggaggcgggagataggacagtaactacccaggattcccattcaatttcttcaaccccatagtcaatcctttatatagtggcatgtgttttaccaggaagaaaggatattttaggaagaaactccctacaacttagctattttaagaacttaaaaagatatgatttttaccaatctgagaaaaccttttatacttcatatagtagttccattcaaatacagtccagttcttgaattaacattttgtctttcttctagttgctagaacctgtctgtcaccagctctttgaattctatcgcagtggagaggagcagttgcttcaatttacgctgcaatttctcccagaactaatttggtgctaccttgcagtctcagccagcagaaatgtgcatagcagtggatgcattgaagctcttcttctaggggtttacaatttggtttgtatttaatggagttaacaaaatcttttttgacaaaatcaaatatataacctgtgcaactgcttttcattttaataaagctagtgtttgttttttcatacaccaaatgactcatagcccattcttccaaatataactttctggggattgggagacatacaagcgtacatgtaattatgtaacttacctttatggattgattgaaggttgaaaatcagaccatttcatttcttttatagagatatctgaaaatatcagtgttgcattttaaattttgtaaacttaaagtccattgtctataaatgatctgtttctgaccttcacagaaagtttgggagaaaagatttactctaatattcaccaatcatagttgcataaaatctagactgtctccagagtgtacaacattattttaacatacggcttgcattactaatagagtttatatgttaattcgtatggtattctagatacttaagttttgtacctttcaaaatagaaaagaaatataaggtcattttcttcacatatttcatatttaaatgattacttcgcttagcaaatataacttgttacatgagtaagatcaaggattattaagacactgtatctgtatctcagccatcctgaaaatttgttacatatgttttttaagtggaaggatgtacagtttaactaccggtgttgatgaataataatggattatcatggtttaaggttttaacttaaaattcctttctattcaggtctttttcaaaaaaatgttttagactatttaaatttagtttgtaaatttgtgtgtaagaaagtatgtattttaatatattttctttcacttctataggaaatagttgacaaacagggacataccaaagtattgagttttacgattccatctttatccaaaccatctgtataccatgaagtaagtgacattttatcacagtaagtttattgaccctaagctttgatattgccacaagttataatctagttatttaggaaaaaaattgatcaatttattagtacctgcaaaagtataaacacccacaaagtatttactatttccaaattgagataagaaatcaaaataaatgaacatcaaactaaaatgtgctaataagagatctattgaaagtattctttttgaaatatttttccctcttcctgatggatggctacttgtgtgtgttggccggcgggcaggggggtggtgggtgggcaattgtgtatttccatggtagaatttgtgaaattaaactaatttttatttctcatttgtggtttgttttaaaattagttattaaatcttcgagcagaaaatttggtaggcagcctaaatatgtttaagatatatgatgttcgtggtagctattttagtggtatatatatattctatatatcaccttttcagcagaatagctttttttttctttattcaaatgtcttttctctagccttccagcattgggtccatggctctgactgagagtgcactatcccagcatggtttgtcaaaagtggtatacagtggacctcatcctcaaagggagatgctgacagcacagaatcggtatactgtggggataaaaattcttatcttaatccactaattttttaagaaaattatttcagtagacttataaataatgtttaatgagttgtgtgtgacaatttatttgaatactgagtcattttatacaagagaaaaacagatctagatttgtcactgtgctttgcttcaggtgtcagctggaacactgaattttaaagacaggtttcatatggctgttacttggaaagtctttttttccttgtagtttttcattattggtgtgcttatactgtgcaggtctgttctgtaacattgtatctctccccaaggagtgctctctcccctattatagttgacttcttagaattctaaagatttgttaatattctttttgtttgtctttaggtttgaagtgttgacattccttttgttgtgttacaatgctgccttaacttacatgcccagtgtttctcttcagtcactgtgtcaaatttgttcaaggtaaagtaaaattcaagtgcttctaatattgaaatatatgaatctatgattgctagtctggtacatacctaagttatttttgttttgtgtaatcatttgtttaaaacattaaataagttaatgtaaagctcagcctacccaacacatggaaagttccctataattgatagtcacaaaaaacatgataaagggccggatgcgatagctcatgtctgtaatttcagcactttgagaacctgaggtgggagtattgcgtgaacccaggagttcaaaaccagcctgggcaacatagcaagacccctgtctctataacaaattttaaaaaatcagctgggcatggtggtgcacgcctgtagtcccagctacctgggaggctgaggtgggaggatcacttgagcccgggaggttgaggctacagtgagctatgattgcaccactgcactccagtctgggcgatagagcaggaccctgtctcaaaaacaaagaacacaaacaaaaacaacaaaaacaagaacatcatgaagaatgtaaagctgaataacgtttaaattgactatttaatcagaaaaggattatagtatatagctaaatgatagagctgttatgacctttcaagttttggcatgtggttggcttctttttgtttgcatttatttatttatttttactgtgctctaatttggaactaagaaataagtaagagatactggttcttaaacttttcttgttaaaaataaattgagccaaggggttataaaataaattatatccttgagtatagtatattcacattttaaaaatcctgatttaaaagagtagttaatgatagtatgtatggtatgatttcctgattggttgaatatgaccagaatattaacaatgattatctctagttggtggaattgtggtttattttaattttctcctttgtgattttttttgtgattttctaaatttttggtaatgtgaatgttactttttttaaaaaggagaaacaaaacaaacaaaaatgacagattattcccctcgataattcaagtaaataagagatattatagaactaaggaacatgtggaataatttctatttgaggaatttatttagaaaatgcaacttatcctgagtgtattagtccattttcatactgctatgaagaaatacccgagactgggtaatttataaaggaaaagatgtttagtggactcacagttccacatggctggggagcctcacaatcatggtggaaagtaaaggaggaacaaaggcacgtcttacatggcagcaggcaagaaagcatatgcaggagaactcccctttataaaaccatcagatctcatgagacttattcactattgtgagaacagcatgggaaaacccaaccccatgattcaattaccccctgactgggttcctcccacgacatgtggagattatgggagctacagttgaagatgagatttgagtagggacacagccaaaccatatcacagaggacgggatcattgagcaatacttagaaatgaaatgaaaacaaaataaacaaaaaatcagaacttgatactgaataggatagaaagccatgcagaatcagcagaggaagagaattcacaagacaaagggcttggtagagaagatagagacgtgaagtctttcaggtgttttccaaattagagcataattacatttcctaaccttaaaagatggtaccagtggttcatctctcccactcaccaagtcgttctaagatgttttttgctttaaattgtttaaaggcagaaatgtccggacttttgaatttcacagatctgtaaaatctcaaaaaaggtggaacagctgggttatttacataagtgttggcaactttttattttgccaagtcattatattgtaaatgtctaccatcaacattatttaacaaaagggagactattttaatatcaaaaaggtgggagggtggaagggaaggaaaataatttataagttaaaaatgggataagtttagctttccttgcttttcgtttcactatggtctagtgaaaactctgttatcgactaaaatgggtataaggaccaacattcagaaatactggtttaaggagtaacaatgcagcaattttcacctctagaacttagaacacactgcaaagtccaggtcctactttgaagcagtgtattagatggtaggatccaggaatgcctatatatgtatatatttgtatttttatgtattatatataaatgtattttttgaagctccatagatgttctaatacagtgcccaaccactcttgacgtttccctgaaactactgacggaaaagttagaaaagaacatgtgtcactgatttttagcctatctaactctaacgtagtacattctaatatacttacttttatattatgagtagaaaattgctaatataccaattttacctgaccagggaactgaataattcttcaacagagaatgcaagtaaaaactggctttaaaaacaaagagaaacagattattttaaaactagctataggattttggccaaggaagttttggtagaaatagatcaatttatgccacaagagaaattaatttcatgtaaatgtccaccagctgtgaaaaaaaacaagagtgggggaaaagatctaagtaatttaaaagacttaagctatctaaataatgctaactcttaactacaatgtgttatattagaggaactctatcaaatttatcattcctgtcatttttagttgtttatgtctttaagttttcattttagattccctattgactgtattctcaatgataaaatccagttatttatttctcttacctactggctttcttaatcatttatcagatattctaattaggaggttttgtacatttctaagatgaatagaaaagaattagaaaacacttttgttaatcatgttaagcctagttcatatctatggaaagaaaattggttacagaactgtggtgataagtaagttagaaatggttataccagttaaagtacaagagcttcttaatgatcttagcactaacacaggttttcctgaagatgaaagtgatcctgctgttacatgggccatctaatcctgtttgccatgtgatagttgttttagattgctgctcaatttggttgatgactataccaaaatgattgactgggtcatctaggagaaaggatacataaatacaaccagaaaaaattcatgggatagatgaactagattcagtgacaaatgtgttacagtctttttttaatcttctgattttaattagttatgaaaataattaaaacaatcttgaacacttcccaccctccacctatgctcacacaaattcattctactgagcaaaaatctgttcagttactataagctttgccttcctgattcagactgattgatggccagcttgatagcctgttttcttcctacatagtatgtgtgaacaacttgaagaagagatctgacagcaagcaagagctaaactgaataagctatagtcaggaagcttttgttctctgctagtactaaatgtatatggcactatgaaaagaaatatactcaccaatgctacaaataagttttgctagtatatgccagagtcctctaagtttgaggaaatgatttctttctgttggacatttaatacaagactgtttaacaaatggcttatcttcttttttgatgtggaatataaatattaagaatgaaactatgctcagctattaagttgaattctctcccattgtctaagggacagctctgattttgtttagctagtgagtcatctaactgacgaacctggatatggatagctgtgagttcctgatcagtgtatttgtttctgtgtacctgtaatgaatccctgcctctcctcacttctaggtcaatttttctgaccacctgaacagattgttttctgtcaattaagggcagctttgttacgagtaagccattttgctcctgactaataaaatttatataaatataaagcacttaatgcagcatcagccactttgctatcatctagtaaatgacagctggcatattattgtaccccatcagtgagcacacacattcactatggatgcacataagtcattgctttcattttttttctcacctgtttgctatgactgtatcaacaattctagagcatatctgatataaggtcatttctggttgaaagaacctatggcaaatttttcaattgcttgttattttatttggaaacttctttttaccggtatgtaaatcttgcccatccttcacaacccaactgaaataatctttcctccaactacgtgagcatgatttttgtgtgtgatcttcacttgagaaacatgacagaagatgcagactttattaagctcttaaagagcagaacaagcaggacagaaaagtgctcattactattcaggcaattcttccactttctcttttctcctttcccctttttctattctcctggtcttttcctctccacttctctctgcccctcttttttttttttttttttttgtgagatggggtcttgctctgttgcccaggctggagtgcagtggcacaatctctgctcactgtaacctccgcctcccaggctcaagcaattcttgtgcctcagcgtcctgagtagctgtgactacaggcaaatgccaccatgcccagctaattgcttgtatttttagtagagacagggtttcgccatgttgcccaggcgggtctcaaactcctgagctcaggcactctgggggcctcagcctcccaaagtgtttacagatgtgagccaccacacccggcctgtttccccttttcagccaagtttctactcactagcctgatgatctggagatccgataataataatctgataataatattatatgtaatattataattatatatttatatataaatatattatctgaatacatttatattatctgataattaacctttcttttctacttttggttctggtctatcatgaataaataaactcactggaatgggtcttcctaatcattttatggtttgtaactgaggctatattaacaatcccaaaagtttatttttattctaagaataacacacatgtctctcaccagagaatgagaatcacaacaagagtttttctcacttacacattgatgctaagaacttctccaagaaatatattgaccaaatacaccttccggaaaggattttattttcacatgccttgtgaatttggcagagtaaatttaatacagacatagctgttatggcactcagctgctcttttgtaaggacatacccttatgtttggatttgtgaagggaaatcagagaacttcaggacatagccgtgatgaacagaggagccaggcattcatgtggcatatagctttattgctttgtttttttggcatttaaattcagtgaagggtatatgggcaaacaatatccttgaagataggaatcagaaaaaacctaattcagagaattcttaagtaccaaaataaaggagtagagaaaagagatgccattaccagttaatgatgcagagggataggactagattattttgggtctcagctcaaatgatacctccttggagaggctttccgtgaccatcattcctaaagtagcactttcccaccctagtttatttccttgtagcactcataacactgtaattaccttgtttgttcttttgatatagactgtcaactgctagaaacttcaagaggtcaggaactttttgttcactgctatatcacaagagcttagaagtgcctggcatatgatagaacctcaataactgttgaatgagtgaatgatagatgagctcttcaactcagatttatgatttgataagtagagttaggattaaaggaaataattggatttttacttttaaaaaatctttcattggtaaataaaatcatcagttttagttttcctagttataaaacattaacaatttgcatttctgaataaacgtttaatttcagcctctgatagatgatcacttatttccttacaagtagctagtatagaaaatgagagaacctggaattttatttcctttgtaaatctttcatgtgtgttggtatttgagagaattgtctctgtaattcttacataaagtaagtttaaaagatgagtgaccatcctagagccatgcaaatttttttttagttgtataataacaacagtaacttacctatgttctgtttcctgaaccctatactatttccttcctgattcctaaacctgtatattcaatccaggaaccatctctgtcaacatgtcccatagataccgtgtaagttttaggactcttcctatggcaaccaactgatatctacatcaaactaaattataccgaaggggccagatgcggtggctcacacctgtaatcctagaactttgggaggccgatgtgggtagatcacttgaggtcaggagtttgagaccagcctggccaacatggcaaaaccccacctctactaaaaatacaaaaattgccagatgtagtggtggggtgcctgtaatcccttctacatgggaggctgaggcaggagaattgcttgaacccgggatgtggaggttgcaatgagctgagatcatcgtgccactgccctccagcctgggcgacagagtgagattccatctcaaaaaaaaaaaaaccaaaaaaaaacacccaaatttttgtacctaggaagagcagtcatggaactggcctcaggatggccagacgttggctcatgcctgtaatcccagcactttgagaggccacggcgggtggatcacttgaggtcaagagcttgagaccaacctggccaacatggtgaaaccctgtctctaataggaatacacacacacacacacacacaaaataaacaggtgcggtgtgggaggctggggcatgagagtcacttgagccccagaggtggagggtgcagtgagcagagattgcaccactgcactccagcctgggcaacagagtgatactccatcttaaaaaacaaacaaacaaaaaaagaactggcctcagggtcagctggatccagagactcagatatttttaggatattccctcccatctcatcatcttcatttgttggcactgtactttgtttttgcagataggcttcttccatgtggtaagaacagtgacctcaggcagctaaaggcttacattgtccacttttttttttgttttttttgagatggagtctcgctctgtctcccaggcaggagtgcagtggcgtgatcccagctcattgcaacctccgcctcctgggttcaagcgattctcctgcctcagcctcgtgagtagctgggattacaggcacatggcaccatgccaggccaatttttgtatttttagtagaaatggggtttcaccatgttggccaggctggtcttgaaacctgaccttgtgatccatctgccttggcctcccaaagtgctgagattacaggtgtgagccaccgtgccaggcccttacattgtctgcttttagtgacctcagcagaaagaacttctcccagcttcagtattaaaaacatccagcaaagggggtgacagcctgagacttctacatacccctatagggccatattgggtaatacaattggaagagtactctgtcaggttaaatattgctttggttgtattaacacagataaacaatgataacttaaagtagatatttatttctctctcacataaaagtccaagctggtaggtggtctcagaggtagattgcttatgtttccaatgtgttcaagttgcttctgtctggggattctgccatttcctatggtattgcccttgttggtatggtctcagatcactactattacatctgccttctatcctgcaagtggggagaaagggagtgaaaggcaagtagctgctttttaggggtatgacatagaagtttttttaggggtatgacccggaagtttcaccactttggttaatacaccattgtctagaacttagtcacatgatcacatctaaatgcaaggaaagctagaaaatgtagtctgtagtggagcggctggcattcctagctaaaattgctgggggaaaggaagggaatgtgacttatatgtatgtattattacaaatagatatggaggtagtgatctctgtaatagatagttttattagcagactcaccataatcatgtgattattcttgattttatggggaaagactagttcctaaagggaagagggatggcagtgcttttaatagaagatagggatggtggcatggcagacaaaattgatactataccacggtacctaaaaatcaacatatctgaaacagtatattccagtgttcctatttgttctaactcagttaatgacaccgtcatgtggtcagctattcaaactaaatgtggaaataattatccactcttcttatttctttggtctcaccttctttatacttcctagatatgactccaaacctacccttcctcctacccaccattatgtcttgtattcagtcctccttcatctcactactgggatcctcatcccacccatctccagtttcaatgaactcttccaatatagccagagtgatgttatcggaagaccaatctgattttggtactcctttgcttaaaacaaaacaaaacatctttagttgcttaccagtgtctacgtggtaaaacctagcaggttataagatattcatgttctggctccatgatgtgatgagcttctctagtatttcctagtgtcctagccctctatcctgctaaaatatccacagtctcctcaatgtcatgctgtttcatcccacctctgcctttgaactttcctatgttttccacttggaaaaatatcactttttcttcaagactcaattcaaaggaatctcttttctgagaattcctctctgactctccgcttcttctacctgagtttaccattctctcctttaccacatcttgaacttgttcattgaaaatatttgcttactacacagtctccatgattagattgtgagtccctgtgggagctacatccatcatgtatatctctagagtctgacacagtatcaatctttaataaatatttacagaatgaataaatgaattaactgaaaatttctttcatccatcggttctctattatttacaaccatacaatcatccctatcataacaatgtgagatgtaagaaagtaaaattttttgtttgcttctttagttaataagagtaacaggagtctctattctagtttgggcatacatttttgtaaattcaaacaaaacttgagtttgttttatttcacatgcagctaatttttctgtttccctgcttactttttactcttggttctaaaaagttctgggatcctctaatatcaaatgcatttatgttgattttttaaagttgctctgaattaatgacattcttggggaatatttttgaaatggtctgtggcatacttagacattttaaagtgaaggcttagattcattgagtaggggaaataactttaagttctaggtagtcagtgcgggggaagagtgagtaaataattacaatctattggctagtattatattaagtgaagctcatattatatcaagcatagaatattatgtgaaagcatctattttctagtaaatttattaaaaataaaaacttactgtttattttaaaaacagtgcatgctgaccaacgtggtgaaaccccatctctactaaatacagaaaaatcagatgggcatggtggcacaggcctgtagtcccagatacttgggaggctgagtcaggagaattgcttgaacctggtaggcagaggtggcagtgaaccaagatcatgtcactgcactccagcctgggcgacaagagggaaactccatctcaaaaacaaaaacaaaaaacaaacaaacaataaaacagtgcatgttggtcagaaagttcaaaaatacatgtaaatataaagaagaaaatagatctataatcccacagatcagagataactatgactttttaatgtactttttgcagtgacacacactatacgcctatttgtttattgcaaaatgggattatgctgcatctgttgttttggacagttttttttccctgtcatttaaatagattttcaaaacattatgtttagtttctatagtattctctgaatgatttatataattggtctcctgtgttggacttttaggttgcttccttttcgttataataaatgctccttagctttagtactccttaaatattcctcactataatacatatttctggagctgagtgtgatacctgtaatctcagcgactgggaggctgatgtgggaggattatttgatgtcaggagttcaagaccagcttggacaacatagcaagaccccatctcaaaaaaaaattttgttttaaacagctaggtgtggtgacatgcacctgtactggggaggttgagatgggaggattgctggaacccaggagttcaaggctgcagtgagccatgatcatgccactacactccagcctaggcacacagcaagaccttgactttaaaaaactaataataataaataaatatttctttgttttttttttttttttagtttccatgtcttctttttatttttatttttttactttaagttctgggacacatgtaccgaacatgcaggtttgtcacataggtatacatgtgccaagaaataaatatttatttacatgtcattttgtttatggtagtttcttgaaaaaaaaaaagtaaaatctattgatctttctttagcattctacctttggtgtcatgtttaggtagcatgcaaagagtatgtaactatttgcctatgttttatttcctttgtggtttttaaacattaacggttataatctatctgaagtttattatggtatactgcatgaagtttgagtctaatttatagaatttttttggatcctgcagtttgtgtcaagaactttgtcagaaattgtggatcataccacacatctatttatgacaaatagtgccaagtttcttttgtctttctttctttcttttttttttttttttaatggaatctcactctgtcacccaggctggagtgcagtggctcgatcttggcttactgcaacctccacctcccaggttcaagtgattgtgctgcctcagcctccctagtagctgggaatacaggcacatgccaccatacccagctaatttttgtatttttactagagacagggttttaccatattgaccaggctggtctcgaactcctggcctaggtgatccacctgccttggcctcccaaagtgttgagattacaggtgtgagccactgagcttgggcagtgccaagtttcatgtagtaggtttagcagtacccaaaaattattggtagttaattgaccaaaattagcgaactaaccagtaagtgaatctggttcatttactctgtgtatcaacatacctcagctttatatgttttttcctggtataacttactcaggaatgtattacagacaaatgttctgtttggaaagattctttgtttcataaatattaggtttgttatgaaagtgtacctagtacattgttggcttataaatgttaaaataaatcacctaaaattttaccaattttagaaatacatttattttggtttttctagaatctgtgtttgtggatatcctcgacaacatgtaagaaaatataaaggtataagtagcaggataccagtttcttcaggattcatggtgcaaatgttaacagggatttattttgccttgtaagtatctcatcatatgcgaaataaacatttaatttctttggaaaattatagtctgttcatctattgtcactatattataatgtcaatagataagtgatttgcatactttttgtgaaatatgaagatcttgataatagttttaatactttaaaactattatcttagtttaaaacatatcttttaaagttctgaagaatttctaaccaactaaaacacttcatcatctttcttaaattcaaggacggaatgaaaatcagtaacacttaaatatattcatggtccctttcttcatttttttttttgctataatttccaaatagctttttttcctcaagaaatatatttttccattgccagaaactttagctcttaaaaaaatttcagagcctctttgattagaaatagtttattattagctttctattagtttctaatattggcgctcagtctgtcttacctgatgacttgggtactagtatttttctttgaaccctatcttttactttataattctcttattatatgtatctcatttactttgcattatattcacttgatacttttaattttctctagtagagtataaactttttgaagacagaatttataaacttcttaaaggcagaatttatggtctgtgggcccagtctggcctgatgcctgtttttgtcaagttttttgcaatacagtcatgcgtgtttgtttatgtattgtctatggctgcttttgtgttacaatggcagagttgaataggtgagactgtacggcccacaagcctaaaatacttattgtctggcccattaagaaaaaattttctgacccttgtgttagaccattaatattgtcccacagttcttggatgctctgatctactttattttatcttttttctttgtgtttcagtttgagtaatttctgttagctatatcttcagcatttatggatttttttccttgactagatcaagtctagaaaggagaccactgaaggcatttttcatctctgttaccgtgttttatttctaaccatttcattagactctttcttgtagttcccgtctctttgctgaaatcttcatctgttcatgcatgttgtccgtcttttccactagagcctttagtatattagtcatagttattttaatttcccaaataacttcaacatttaggtcatctatgaatttagttccactgcttgctttatctcttgacagagttggtcttgtttgttttgcttttcatgtgccttgtaatttttgattgttcatgattttgtttagcagtaggacagtagagactgaggtaaatattatttatgacaggaaatgggcatgcctcttctaggctgctagtggaattattataggcagaagtgacctaggattgggttttgttgttatggttaccctcagggcaccatctacttcaaattcctctagtgctacctggtacttaggtggagagctggattgctggagggtttttcttaatactcctgcttcgtcctcagctttcagccttctctgtatgcctccactgcagataggtttctttccatgttctcaccccttcctccagcagtacagttctgttgcttggttctgggtgtgcactagcctggtggtggctggggcggtggtggggttgggtgggggggcatggaaatggggggaggtagtgttctctgttgtcctggtccagcctcagttttaggctgatcccatgtccccgcatctcagggatgggagtttctcagtagtcctgccccttcagtgatgacccccactacttatctcagcatagaatgagaggttttttgcttttttttttttttcttaccctcagagccgaattggtcttcacttgttcgctggggggtgaaagggattgctgctctttccccaaaggctttaaaatttttgttctgtgtgataaaggcatctggctggctctttgtacttttctcacaggagtggttactcttttccttcaggcctataccatcaagggcagttttctctgacctgccctgtttctagtttttcttgtgagtgcctaaaggagatttatggcgaagagcctgtggtggatacaggctcccacttgtatgtgcttttagagattctgtactctcctgctagcccatgagttaccttttagcaatttggcttctaggaatttgttaagaaaattagctaaatgtttcttacctgcttgtattgtggcccatctctccttagaggcacctgtctccctttagggttccggctatgtggaagcccttgttacctcggctctttgatggattcttgagaatttataattttgtagattacctggctttatcttgtttttatggtgggagcaatgttcttgccagtttttaggcctcgcttgcactcttgatgtaatttatacctctttattttgttggaagttgatcaagccactatatccctgttcatttttgtaatttagctgatttttaggaagggtttggcatatctttgaaaattatgcatacacacacactcacacatgcacacacacacacatgcacagacacacacacacatgcacacacactttttccctcaagttgctctgctatttgcaacatgtagcaaatacacttctaagtgattatcagaatgcaaagaaataactactcaggatactgcaagccacactggtagtagattctcattaaaaactgtgggagttacagaataatttggccataaagtgttctgaacatttttctaaggtatataatttattattctctgatttgctttgaaagtataaaatgctttgaaattgccttagctttttttatttctgttctataaatagtcatgttctttagagaagaaatgtacatctataaaattttctttgctattaataggcatttagatgcaattgaaaggaattcaaagatttaaagatacatttttaagaggagtagaatgttaagcaatgtgctaatatgatcttttattttcttcagtaaagatagtttctcattgtattttgttcagttataaataattataatttcttcatttaattcatctaattttatagttataatggagaatgggatctagctcaaaaagcactggatgatattatatacagagcccagctagaattatatccagagccattgctggtaggtgcctgacttatttatgtaaatgttataatttaagatttctcaatttagaactataaattgagagccattcatagtttattaatatgtcattaatactcagtgtattcatgctcttgttatacatggaagttttataacttagaaaagtaacaaataatttttttttaaattttctttgagacggagtttagctcttgttgcccaggctggagtgcaatggcacgatctcggctctccgcaacctccgcctcctgggttcaagcgattttcctgcctcggcctcccgagtagctgggattacaggcacgtgccaccatgcccagctaattttttgtatttttagtagagacaggatttattcatgttggtcaggctgatctcaaactcccgacctcaggtgatcaggccccctcggcctcccaaagtgctgggattacaggcgtgagccactgcacctggccaaaataaaaatttttattagactgacttcctagacacctaactgtctttttaacttatgagaattgttctccttaacatactttagctgcatttattaattaacattaggcatttggaaatctaattgaatattttgaaatttttaactttatcatttacatatttttttaaccatgaatttccctcttagcctcctattcttatcttagaggatttctgtatcatcttataaaatgcttgggaagagcctctttgtataagcctgtttagcatcatgttttatcgaagggttagataatatatctgctctatctgctcatgttgatcttaaactatattttttctccttaggttgctaatgcaataaaggcttcattgcctcatggtcccatgaaatctaataaggaaggtacaaggtgtattcaagttgaaatcacaccaacttcctctcgaatatcaagaaatgcagtaaccagcatgtcaataaggggtcataggtggaaaagacatggtaagaaatacgtaactcttcaagtcaaaccattgttgattcttttacatttttcactgtacttatggtgctataacttctaacttcagtaaatagtaatctggaagaaagagctgtggagttgcccttaactcctaatttattatctaggagcaataggcagtaagaaaaatggagccccttatgttacacatatgaatgaaaatgtatttaaaaatcatattcaatttgaaattgttacttcagtaggagaataaggaaaatgcattttaaaattactcatacattttgggcttgtattcaaaagtatttgcaaatgttccttaattaatatttctgatttctcagtgaactcttaagcaagtgaatttacatattgaagtagaacaactaatagggactttaaacactttgtctgcactttctggtaaagaatgccatagtgttgacgcaacactagttgtattttcttgaagttaattttctttcaagattctgtgtatgtgtgtgtgtatatatatatcccttcttgtctgcttcattttattattttaaaattttattggaagtcattttcattcactatggctttttcagtgctttcccatttccctcccttgtcttttaatttattgttctttatttaatttcatattatttttataacttccctcctacctagaagttattgtagtgtcaacaaccagtctaagaaggaaattatcaccttcctcagaaggtaaccatggtgggaagcaaaaagctacttctttaccctaagcaaacgtgtatattagaggtaaaacaaaatccattctctattttcttcttcctgtaaactgaggtgaaaataatagttccttttggtatatttggtactggttgtgttgtggtttctatagagaaaatgggaaaggagaagaatggagctatttatggtaaactagaaagttggtgatgagaacagttgccattgttttcacttaaggaatctaggtgattgtatgtcagaaaacaataatgattatccagcttacctagtgatcatttttggtgtttttaaagtgtagcaattcttgaaagttccataggaaagtataaaagaggcggtgatgtttgccaatagcaaggcaaattataccaccatttaaaacatatagtctaaacatacttcagcttcttcagtgaaaattatgctactgaatggggctagattacaggtagaaagtaatttaattagatatggtttaccctgaggttggtttttctgttttggcattaatgtgtgagaacaggcacggaggcaatgaagcagatcatagtggttactgtggccataattgcttctaagctactgctacaggaagcacaagaatgaattttaatttcttttccactttccttcttgctatttaggtagacatattgggaatttgggagagaaatgtaggtcctgcagttaaaaatgtgaaatattgatgctcccttgtatttgtgcatatgtgtgtatatgagagagagtatgtgtgcatgtccaggcgtacatttaaacaaggaggtctgtaccctgcaacaaaatggaagccatttcccagacatattttataggaaaaaaattacaaaacaagagaaaagactgcttgaatgtattgtttctagcagattcttacatatcttccagattgtattttggctgccacttgaggggttagcactctgtcttaggattgtaccctcattaaagtagcattcttatcacctgtaccccttcacaattctaacacttgggaaactctgtttattataacaataaagtcacagatgagaatatagaagtgaatgaactataaaaagtaagtcacatgcatggaacaggtacagaatacagcttagccttgtttatcactcttctttagtgtgaattccctttatccagtggactctaaaatactcttaagtccttcttatttgcctctacaggtaggttgcagtctcctccctttttagggtagtcttggctttcccttctagagcagtaaagttaccatgttcggctgaatttgaaaggtttctattttccatcctcatggtcctgcttcctacttgaacacattgtttttctaggctctctaacaggcactggcttcctgtggggaaggtagacacctttgctgtacttcttagatatatagacaattctcaaattataaatagatttttaaatttaattttgtttatatataaattacaaatttctcaaattatagattttttaatttaattgtgttaatatataaattctattgttaatatttatatataaatcaaaacaaaatttgtttatacatttctttagaaacaatgttaaagggcttgtagatcccagggtgagccacaacagcctttttatctcataatgtttctgaaacataggactatagaatgtaagttcagtttatggctgtatgaaaatacatttagagtttctatatttaatggaactctaaatgtgtttcccattccacccactcatatccctactattccctcaccacaccaaccctcacagtaggacaaatttcttcccaaaccctcagctgtatctatcatacagtagaaacaaggaatatcccaccttaagccagtggtgatgaggattgggaaaggagaagggacgagaaccatgaactttaagaaatattctttttttcctctttctccttgcctctttgttttcctagtttttggaaagaagaaagcaattggcccttttttctttttttctgttggagctcttctctttttcttttacttatttgtctttatttattattgcatttcctctaatttctcctctttctatcttttctgggtagaagagggaaacgagtgaatgaggttttctcatggaagacgccaagtaaaactttcctttttgcttttttttttttttccatctccctttaccataaaagaatatacgtaattaagccatgtgaatgtactggtgtgtttgcatatctgagtcaccaaaaattattacacagccgacaaatacattaaattagagcaattaatggatatttattctcttttattatcagtaacagaagaatctttcaattttctttacagcccaatctcacattgtagtgtttttaaaatgaattttgaaaagttttaattgtttacattttaaaatattttaaagctatcctagaatgtattttaggattctgtaacgcttcatagatctgccatttttttcttaaggttaagaattattcacaacatattttaatggaaagtattataatggaagtttaaaaattactttattcttaacatttctacacatttcagaatacgcatctctggccatggttttgctgttgttatcaattcaagtttctagaattgtattttgaccagtcctgttatttgcttggctctgttttttatttttatttttttagtaaactttattttttagagcagttttaggttaacagccaaattgagtggaaaataagagagttcttaaatacctcatgaccccacattcatagcctcccccagtatatcaacatcccgcaccagagtggtacgtttgtaaggacctataatttaaattttgaccagacagtgcatcctcatgtcaattaaataggatgatttttaaagaaaggttggttttaactgaggtattattttggagagatctgtttgacaactaatggtgtgtttgcttgatttgccccacttttcagtttaagttaaacaattgtatggacatggcttaacttaatgtgtttttcaaattttttaaactttgtgtttaaatctttgagaaaattctaatgacttcataattttatgtcagtaaatatgtttgggaaataaaattacagtgtagaattgctgctttcgacttttaaggaacataatttcagaattaaaagctttatgtgttgcttattcttttatgcgtattgtgtttaatttagtctatagatggcaaataattcaaggcaaaggtgtattttttcaaacatagattttcaagtcacctacaaattgagggctgtctagaagtcataatttgaaagtaaaacatagtgggagaaagataataataaaataagctttaaaaagcattcaataagtttagagaagactgaatagattatgaccataataaaagtcaaaatgaaaattccagtaagaaaaatgagataaaatttagtaaaataattcattaatttttcaagttaatcattaaaattcaattttgcttaaatatttatttccttttaaaaataaaaagaagttaaaggaaaatagaaagttatttctttataattatgctttaattctatagtcattcttaaatgtcgtttccaaagataccttcatcatctaccatttcagctattttaaaaagccccttttcttaagtccctgaaaagttctctaccactccagtattctagtatacaatttatacttgtttatttccttgtgtttttccattccttcctccttttctagagcaaatctaattgctattttctctctgttcacgacaactactactaccatgattactcattcttcttccactttttaagaaattatccatacttggaacaatgtaagagatttcctcctttctttcaaaatagttattgtaatactagtcattcattctataaaagtcccctaattaagttatagttccaaataatgagtgcttatattttttgccaactaatcaaaaggcttatccagtggaatctcgatttttttattgctgcccatcattcttcccacttgtgcctttgtgagataatgagacaagtaagtgaaaacatttggtatactttaaagcactacataaaggtagattattaattaagaacagttttgtttgttttactagctacaaaataagtatattcttaataagtttttattagctagtttgctattcaagttgtcctgtgattctttagtactttcccaaaactgtaagtttttgaaacttgtaatttggattttctcaatttgagttaaacttgtttagtttgagtatagcatcaaatgcaaaaatacacgttatataatagtaacaattactttaaagattttttgtatgttctgtgatactggagtatagtactctaactttattatctaacgtgtatatcactattacagtaaggattttaaaaatgttgttattgtttcaatcccaagttaatataaaaatagaaattacatagacaaaatttatgtttcttatttatgtacagttataactgtttgcaactagtaggtatcaataataaaaggaatgtttataaacaagatactttcaatgtttccctacttttggtcctggcagatgttaaatggtttattttaataacagtgcatttaattattttcagttaggggatccaagagtacaaaattttaagtagtaaaaaagaattaaaagtagcaactgtatatatttctaagtcttctaacttaatgatgcaaaataagtactgcaagaattttagaatatttaattatatgcagtgtttatgtgaacaatcagactaaatgaaatttatgtagttgaaataaaaagaaagtacagtttcatgttgttaaagcagttttattgcatttttcagcatttaaaataattgcttctctttaatggatgccatcatatttaaataaagttaaatgattataacagagttcaaagagatttaaaaaaaacaaaaaagtgatttgtttcataatttgcttattcagtggtttagtactagcttgttagatgaaaaaagaaaagaataaaagattgcaattcatatcggaaaacatttaaaactggttattgatttagaaaattctaataaatttctgctgtataataacattgataaagcaaggaagtactaattattgaacaaatctgaaaaattataatgggtgtattttagtaaatattataaataataattgtttataaatatttttaagcatttaaggttgtctttctagatattacaaaaggtaaatggtaataaatcttgaaatggaacatttattttgtaaatctgattttacaactatgagaaaagtcttcagttgaggagaaataaagttgctaacagttaagaagcattttgaaaaacaaagaaatggtaataattttaaaccccaaagtagtaaactttacagaattgtctattggaatgatttttacatcggcaattaaaaatttataatgtgtatgtttttattttaaaggttgtctatacttattaaggaaatttagaaaataaaaaattatctggcagttttattttaaaaaatgtaaatacttttagtatcattttgagaagctccattactttcagattctaaaatgctatttgaggaacagattttctttcccaatatagaagataaaacatttggacaaaaataagcatttctttcttaccaaaaattttgtgaattttaactggcattttcaatgtggaacttccatggaggacaaaataaaatattaggaaatattagattactcaaggaaaaaagacatattaaccaaagagctgaaatacattgatatgtttgacacatgtggatattaagtttgagagaggaaagaaagactgtgtacagaatcctgacttagacaatttttgaggaaaacaaaaaatctcattttatttccaggtaaaatgaagttaaaaaattttccagccagagacagaattattggtctcatgaggcaaaaaaacttgttcgtaaattattgtattctacatttttactaagggggacttacataaatcttgctgtagttaagaaagttattattttttattattgattattgagcactcctcctttctccacctttttatgagcatttgctgcacattgcacaccaaggaagaaataagcttttacaggtagttttgtaataggtgttgctgacctgtttttggtctgtgctacgtggtcatgaggatctgtaataatcataaaggattcacctggtcctgcagcggccgtatgttgcaattctctattggattttatttaaaacttgagacttaataaagatgacaaaaggagttactgagagtaattgaatccacctcaataaggagaattctgtcatttaccatgtatacaactaaagctaaagatctgactgtttatctcttatggaaactgctgatagctcctaactggtgtgtctatacaaattgtcttgttccagactgtttttctgtatgccccaggctgctcttttcttacctagaaagactacttactgcttcagagctcagattttgacatcttagtctttgtttttgcccttgctcagagtgcagccctttaactgcagggtcccatcctgtgtttctgtgatagctttgttttcctctaatctgccttgtaaatactggcccaggttaagcattgccacagtgctattctttatgacttgggacacagtttatgctcagtatcttgtgttacgcgaatgtgacttctattgataaaaaaggctagtaaagtatgaaagatatgcaaatagttttttcatgtagctgtcactggccatccactgtaatcacaataaaatccagacttcgtgctatggcatatgtgatcctggtgatatgacctcttgactactgctttgacctcactttaagaccactctcaccctggttcattagactccttcattctaacacttcaacgtactaagccattctgccttaggggcattgtctagttatttggagtatttgagctgaaatttgaatagtgaaaggtatgttgacttcccttactccagattgttgtgtggctagcagtttttcatcattcaaacctcagcttaaacatctcttcttcaaagaggttttcccagaccacccatctaagtacttttatcccctattaccctacttcctctttcccatcttatttttttattgcattttctgctatttaaattatcttgtttacttggttccgatattacagtgtgagctctgttcccttattatatagtgagggaagaatctatctttttggctgttgtatccccagcatctaaatcaatgtctgacatattataggtgctcaacaaatttcagttgaatgcatgaataagtgagtgaatgataaagaaatgtataacatagggtgagcaagttgttctttcttttcttgttttgttgaagaacagtataacaacatgatagtaaactagattaggggatatttacttataattccagtatttaaagaattttcatttagttttttctatgcatgtatgttttcatggttgtactctatttaaacttttttggtattttgtttttgtttagttaatattgtcagacattttccctagttctcctagtaaatacagttattttaatggctacatgatatcacattgagttaatattccatcatttgcttaatcattcttctaatatgttaagaaatttgtttctgagttttgctattataaataacactgtaaggaatagcttaatgaatacagataacatttttctccattgaacagaatatattataaacataaaatgactatattaaaggatatttgttctggtatggcatttaaaatatctacatctcataaattgtaaaagaatgtgtatgactttgttttggggtttattctaagttaaagtatttttcataattcatgtaaaaaattgtatgatgcagacaaataataaattatatttttaaagcttcagcttattattttcacaaataagtttgtaagcaccccatgtcagagccagatgcctttagactcaaagtaatctgagtacagagatgtataaattctatgaataaataaattattcttttattaaaattctcacctttagtaaatatggcagccataaaacaaataaaagcaaaagctaaggtggttttgtaagtgacataataaaatagatatttgggattataaaatgacatttgagagaaatcacaacttttcgtcatcagttttaataatatttgcaatttgcttcactttttttcttaaagctggaagaaatttttttgggcaaaattatttgagtacctttgagaactaatttggaaatgtctattaaaagtattctttaactttcatttctacatgtggagagtttacctatttgtgcatatagggggttacacaaataaaatatatcctgagaagtttctttttggatcttttttgagctttttgaattatttgaagtcaagtacttgttttttgttttttttttaaggtgtggattaatcatgactccatttgcatagattgttaagttctgggaaaaacaaaatctattttattatgcatttatattcccttacagcatcttctatataattttcttaaagaaaggattaagttctactctttagctatatatgccatcctctggataacataataaaaaaatagattttaaaaatgatctttttgacctaagcatcttgctaaacctacatttagagacggctccttcacttttccaaaacaaagaggctttgcttttctttgccatgtaaaaattcttattagcataagctatatgtatttcatttatccagtcaagtaacacattcacagcttacccttctcatgtcttctgtatgttttctcacttttatttattctaataatttaatctcataacagaatattcactcaattcatcaaaaaaagatgtattgagtgtctactatatacaagctacttttccaggtactagatacatagtagtgactagatgaaaattttaaaaactccttcctcatggaacttaggtctaggaaacaagataaataaataattgtaggttagagagtgttaagtgctaagaagaagaaaaaaggaagagggtatgtgaaacgtgggggctattaaaactttggatgggttgaccaagggagacttcactgtaaaggaaatttttgaaaaagatgtgaagtaaggaaatgagccattcagccaccaggagaagacagcagccaggacagcagtaagacagtgtgggtgggaatgtcgggtcacagagttatatagggaaagaagttggagagctgatagagagcaagattaggtaacaaatgtttgtttggattacttaattatctttctttattctgtagttttcctgagaattatgtttctgttctttctagctctgtacagaattacttgctcttcttataaatttaataagcagtttaaaaaatctgccattgttaaccatttttgagtgataacaagtatcaattaattaggtaaagacttatgcttgtgggaaaacacatgatcttatttttctacttgccatttaattccatgatttttttaaatgtaatatcattacttcttgggctgcagacctttattctgataaaagtgattacatttcagttgcgtggtactgctttatgtaatattctccctgtcattttctagtttttcttgcaaaatcctgaatttctgccattgaagcaccactttagattaacagctttcattggcatctcttaaaaaattgacccaattaaaaaaatacacagacctaaactcaagaattattactttcctaggatttcttccagacttttattttctccggctctccattcaaagtaaattgtttgctttttgtaaaatggccaggaatctacatgaataaattaaacctaactgtgggatgtcagaggatatttaactcaaacggactcgaatgaagagttagagttagtatttatagtatgttagaagagacatttgaagttaaaagattttactggttagcttcccccactgaatagttgtgtagctcttcctgaacttcagtttccttgtctgtaaatgggaatcaaattgcctacttcagaggctcactaatagattgttttgagattacaattgaataatatatgtgaacactttcaagaaagcgacttagggcaattcattgtaagtattgttctgtattctattaggcctatgcttagcttttaaaattttattaaattttaatattcattgccttttttatgtctggataatttccgaagtttgattttttttggactggagatccctttagtagatcttttgtgaaacagcttccacaatgtaaataaacaagtcttggctgtcactccacagtgccatggcgattttatctcagttgcagtgacctctggcatgtacctcaataagaatttatttgccctaacttggaagacagttgttagcaattggaaacaggcttggttggaggtttttagtttcattaatcctttattacagagcacccagaagcagcagtgcactactacctcaccaacattcttcagcctatctaggaaataaaaacttcatttagagaacctttagtcaaaagcctatgaagcactaatttaggggaaataattacaccagcatgttggctcagcagtgcgaggcaccatgaagctttgaggaggggctcccagaagtgcatattgctgctgggtatggagtatccaaggcacccgtaacaacttttatcttaagtttttaaaatttgaaagaatcagaatagagcagtggttcccagactttgttacacgttagtcacctggggcttttaaaaatcttatgcccaggtcatatctcacactaattataaattagaatgtttgggggttggagccaggcatcagtagtttttaaagatgctcaggtgataccaatgtgcagctaagttagggaaccacagtaatatgtggctctggcctttgttcttttactacctgttactgtttctcagcctttagcatcattagtgggagtctgataatcctatcacgaaagtatttgaaaatagtaggtgatgtcccataagcaggtttgtggtctacagtttttaaaaagtatatgctgttttacatagtcttatgttgctttgaactttgtttcactactgtcaccttctaggtatatttatgttacttttccccatttacatgaataactccttgtaacattatgcctttcttatttaagaccagaataaaatcatgtctacaggtattaactagttaggagttttgtttctttgtttcatttataatggctgttttcagataaagggctgacaacgaatttgtttttccaaatccatttttatttttctctagtctagtaatgaactaaatttatgaaattggtatgagtctgaataaatcaactgcttaactatatcacagccacattaatacttactgttaataatagatgatgtatatgtgagacaaaaactatacctgtgccattactaaccatgatatcatatatgaataagcattttcccaaatatcatggtttattaagtcagtctcaatgtagcctcataaaaaatagaattttaagagtacaaaggggaacttctgtgtggcttggttcctaatgttgacaaaagctaaaggtttggctgtagatccttgaacatttgcctaagacttgacataaattcaggtggtcaccatattatcttaaaaacactagaaaattacccaaagaacacaaaaagaacaatttaaaaacaaattttattttgatttattagaaaatttatctttcatattccatgtgaaatgtgtgtgtgaaaaaatgcagaacgtgaattgatgctctgtgaattttttgtttgtcatttaaaattaaagaatatgaccctattgtctctggtgctatcagagtattataaattatggaaattactacagtgcaaatatttggcttaattcataacattcagtcatctaatttttgttttgagtcttttgcttttctcatttcacgtttttgttttgttttcatccatcattttgtcttatcatcttcaattctagagcaacctgacaacaataatgatgctactgaattgggcatccttgtcattcctgagattagtgtcacaaatgtggccggagagagaaccgggaatggggaaaaaggcagaacactaggagagattgatgctcagcatatacagggtgtgcaggaaacagccacagatcctagaactgagagcaaaggcttgccagagatcaggaggcaaaaatctgtaagaaaaatgatggaggatggaataaactcacctggcagagtgcagttttagcagagcactttataactgcactccaaggtatcttaaggcaaagggccactgatgcatgttaagcagcagttgcacagtcacaaaaattttgcatgtaatctaatccaaatgcatgaattatgcaccacatttctcaatgactcttaatgttctttggaatgattatacctttatcgtctttgagtaaatttttatgaaaactgaggcagaaaattccttctaaaataattttctgcttatgtttggagttctaaaattactttttcggctttgtctttttgccatctttgttatgaaggataatgtgtatagaattttatgtttgagcttgtgatatttagagtctagatttttttaatttgataaaataatctacaatatagagtacaaccttctaaaaaagtctttaaagtattctaataccaattttttaaaagttccttggtaagagctttgattttatactgctttgctactgaaggagagttcacccctagttttactgcgtgatatttctaattgtttcttatcttttgcatgaataggagaattctttctaaaaacttaatggggtatggtttatggcatgctttttgtttaatacactataaattactgtcatttaattacagtgaagtatttttgacattttataataaatgttttgatttatcctttgattttctataatctgttgctttataaattatgctaaagcttaatttatgtaaagcataactgatttggtgttaatcatttaaaaagattgcttaaaatacttaatgttaattaatctttgtcatttctttgtttaggaaatacagaattaacaggtcaagaagaactgatggagatatctgaagttgacgagggattttattccagggctgcgtctagtaccagccagtcgggtttatcaaacagtagtcacaattgtagtaacaagccaagtataggaaagaaccacagacggtcaggaggaagcaaaactggaggaaaagaaaaagaaactacaggggaatcttgcaaagatcactttgctcgaaaacaaactcagagagcccaaagtgagaatcttgagcttctctctttgaagagacttactttaacaaccagccaatccctacctaagcctagtagccatggtttggctaagaccgcagcgactgtatttagtaaatcctttgaacaagtcagtggtgtcacagtcccacataacccgtcatctgctgttggttgtggggctgggacagatgccaataggttttccgcttgtagtctccaagaagaaaagcttatttacgtttcagaaagaactgaacttccaatgaagcatcaatcaggtcagcagagacctcctagtattagcattactctgtccacagattaattagtaacatatttttctcccataacctagtgaacctggaaatacaactttgcttctttatgaaagtaccctgggtctttcatccgtattcctgacaggagccctgatgtcttaaattctgaaggctcccctgactttatgaagggaagattgtctaggttgcagtaagttgaaatatggttttgttatttcttgattaagattttttccccttggtttgagtcttttttttccctcctcttatttgttattgttgccctaagattgtcagtgacaataaattttgacaggttgtctaatcaagttggttatgtctcatgtgaggttgtaaggtggtttttcttgttttggtttggtttggttttttaatagctcctattttgatggctgtgtgtttggccttcagagtcaaagggagtctgcatgtatgggaactgttttatagagaatggggcagaggcacaactccaggaattctctagctcctggtcaggaagccaatctgaaaacaggcatgtggaaacacaaaaatgatgtgtatgaaaagcacctgatgaaaatatttgtaagcagatcatctttatgattagaacaatttgctcaaagccctggaaaatgcctggtaacccagtgcctagaatattatatgattccaggggatggctagaggcatttctgttgttatctctgaaacatttttatatcaaaaatcagattgctggtaggtgtgttgttttgaagtgttttatctggatttagcatgtgaagatccctttcaattattaaggtataataggctgtaaagctgatttaccctactgctggactttggaaatcctagttagtttggactcctataattcagagcatacgtcattggaagacttcctggaaatcagtgtaaatcttgcaacatagctctcaagataccactgtataatatgtaattgtttgtctgcaaatgcatttttcatctataaaatgtcatgaaagaaaataaaggtagtgaaatatggacaaaggacatttatatattaactaaagttgtttatgtttgtgttcttaaatttaaaacacgaagaaaaagaaatgtctttcttgttagtgaacaggcctgttttaaatatcttagtatgatatcaaaagaataatcaatttagttacctcccaactaaaaagtaaaaatgaaaaagacgacatggcagaagttgaaacaaacttgtatgtatctgtatgtgacctctagatggaaataaaagtttgatgtttgctagccgtggtccttttggctatggttgcggttcccctgtaaagcaaatgtacttaagtcatcattcagagtgagagagagaaagcacggctgaggctgagtcagttgaccgttgaggaagacctaaggagctgtccagttcttggctctttttcactgtgactgcacagcggtttccttcttcatagtcccttgctgtagtcaccaagagagcatgctagtgttttcctcttgttcctgcttatgcagagctcagatatatgaaaaatttgtatgctttgaaggctgccaaagcatttatactctggacatagttttaactgcaactgctttggctaccagtttaaaccgagttcttcaaaaagcatgaactcgttttcattcattagccctgtttacaatgtggattttgacataaatgaatttgattttcttttagctccagtaacagaatggaataagatctattgccataaattgtagttaagaactgtaaggcaatcgggcagtgaaacttgatattgtattaacttaataggaaccctgtgtacaatttaaaatatttgtaaaatatcactgtgaatttacagatgtctttttgtcattctttaacaatgaatttcccctgtgcatagttattaatagtattggtattattaaaaactaatttggcattttaagattggcattttaagcaagttgaggtgcttaggaaacattgtagaataagtttggggaaatgttagctgacagagctgagagatcagattttcatgttctatcactgtaatggaacctcatttagacctctctagacctttgctagctgtgtggtctgaggaccagtaagtaggattggcattatctggtatcttgttaaaaatgcagaatttcatgccactctaggtctactaaatcagaatttgcattcttaacaaggttcccaagtgatttttatgagaagaaagtatcagagtgcaaacaaattactcgtctaatatgtagaattcccagtggtctcacagccctagatcaaatgtgtcagacactagatcattataatcttcattggttttgacagctaattaattagtttaataatattgacatatggcttcttaagtatttgaattctagattgctaatgatccttatttttgcagtaaaaaagtaacactttatatttttcttgttaactataaatggaatcagagctgtaaatgcctgaaattttaagtgtgaaaaggggtgccacccttttatatactgcacaacaaatttgcatttgtatattctttttaaaaaatctctgaagacttgctcagtgaaatggttctgattttttgcttcaaatgatttgcactaattgattttctggagagcggagttacgttaacaacaaaattcttttatagttcctttgatactatttcaaataaggattacacattgaaagtttttatagaaattatgaaaattggataatcttaactatggtaaccattactattatccatactactttctccccactgaactttcaaatttgaaaattggggtagcttttgtaggtcactttcttataaagatgctgatggtcacagatctcctaagtatccagaataatatttttatcatgagaaggattccacacaaaattggggtcttgcaccccatatttcagaggatctgaacagaaattgtggcttcattgcacattttaaatctctatagattcttgaaatcacccaacctctcacatttgaaaacccaacggcctggagtattctggtggcactggagccagcactagctttttggaatccaagtggggagagaaacaaaaatagacttttcaagggactgtcccagactacccagggcaaatgtcttcccttcccttcctgaagccacaggaaagcaccctggagtcctttgtataccactatggaaatttttaaggcaagctctcaagacttgaagagttggaattctcggcatttaaatgatgcctgaagtttgttttgaaaaagcaatatttcattgctcttttcaattgtgaagcaactgctcagcaaatattactcatttttttaaaaagttgaattaaagggaaatatatttttaaaaccaaaatagatcaaaatgatcccagttttaagggattttgcctattttggaagaataaaactaaaatgttaaaactgttgaattacagagaacagatgtactctgagacataattttaaacaaatatttaaaataaggcaggttaacatttgcgtttaggcacaataaatctgtattaaagggaagcacatcaaggaaatatatacatgttgaataatgtaactgaaaaatattttttaaaaaccacttaaaaagaaaaataatttgatgggtactttaagcattgtagatagaaattaatgtataatagtgtcctcccagtctttgtatgaaaaattaaaactctctagtcctttaatgagcatgaatttatacttctacatttgttgcttagtaaaattatactcagtactttgagttattcagatttatgtttaatattgttaaattcttcatcagagagcataaatatattgtcttctatactttgtaacttgtgcatatctaaagaaactaacaacgaacattttgggagatgtttttgtgtttttttatagtagagttttagagtacatttgtcttaataggaagtttttaccataaacccaagattttatttcacgtattgttgctttctcttatatggaacttattgtgtacctcttacctttatttctaatcatttagtgatactaatcttttcatagtaaatatatttgtttctaattgtattcctagagtttacattcctaaagaataaacgacgactttggctatttttgtgtgttccctaccttcttaaggctatggaaataaactggagtttagttttttgaatttttgtatatttgtgtaaatgttctccatatgtagtactttatacaacaagtgttgcctcttgttttattgaaataaaaactgaaaaaaata

SEQ ID NO: 159 - DNA, 565632 bp, Homo sapiens
acagtctgaggctgtaatgggaaagtcggttcctgggctgctgtctcatagacatcagcttgcagggaagctgggggctctccgaattgccctgctccggggcccctcctgctgcgtgactcacaggcacattgcagagagaagctgccgctcccagtaagtgcttaaagaaggtctttattcagagcattttggaagcggggaggaagtgtttgtgttgatagggggtgctggaagcctttgtaaaaccccctccttgggtctgggctgggcagcggcgctttccatgccattctggagttcaaaggcagcgctgatgtgcaaatgttccccagccctggttttggtttgttctccatgtgatgtgtttttctgatttgcattttctctttctgtaatcgtagggcagatttttaagatctggttaaagtgaattgatttatttgagattcccagccccagagtggacttggtgttccctgtatgataagcagggagaggggcaagagggtggtggctcttttggtcagaatactgcttgtgttaagacactggctgtgtctgtgccggagaaagtggttgccaccccttctctgcattgggtgagtaggtggtgtgagagaaagcgggggtgaaccagcagtaaagagatttaattagtttttggtaaacagcagtgctattagtatgttgcctttttttatggtcaaaatttatattaaatagtgtcagctggcagaacaggtgctggcagtagaagaatgatggagttctttctccctttcccagctagtgaattgtctttcctgcatcgaaagcccaattaaggagtagagagaaatgtaacagatacagatttctgagcagtgtttttttgtttgtttgtttgttctttggcttggtttttattttttattcctaaaaagcaccacattcccacactcatgcatcaggaatgattctcacctcgacgatgtcttaggtgtggcctttttggagagcaaaggaataaattcaataacatctttctcttcctcctgagcatataacattaagtttgctttagagactgaaaataaatgtgtgtggttggaaggagatataaaggggaatttagaagaacagattgtttatttgccctggcacttttctgtgaacacttgatagagttctaggtcaaggtgtatggtgtccccttgagggataataggcaaataattaggctatgtctttaagcattggaaaatctttattttttaaaggaagagaacctagtcttttctatgaatctctgcacaaaccagagactttggggccaaacactgattccagaaacacttaggcattgaagaaacttttgggtgagaaagatgatggtatgaatgcaaagaaaatatgcttagatgagttttgtcctttttttttagccttttgcagtatatggtttaagtcacagaacaacaaacaacagaagagagcatgccccacccagtgttgtgaacatggatgattcccctcccattctattccactgaactgcataaacactagcacagagacagttctaattcatcttttgaaccctgtatgttacaggtacaagccatataaaatgaagacatagagaaatggaagatcctcccaccccaccctactttctcctccttccatattgttgagtgaagctatattcatcttggaaagggtctgcatcactgcttgtaattttgttagccatttcttgtagacgagcacggtgtgaggaattcagaggtagtcttcctgatctggccctccgtctctgcctagaccacacccccttttttggccacatgcctaaaactctctgaaggggagtgtgataaaacgatgctcatccttgggcacatggattcctcggtcacaaaactgaagaggcctgatttctctgcagacacacatttcctgcttctcagggtgaagatacccatttatgggggttttagaattccttttctttaacacagtaatgtgaaaagaaatggaagaaaattatccatttttccatctcactcacacaactatgtttaatgtcctgtatcctcttcctgtctttatcatcacattaggctagctatgtttaatgcagaagggctatccacactccttcagatttctgcttttcagggaaggcacctgtagttacagtcttagaactggaccagaccctattaggactgatagttcagccatatttcacagagggtaaagctggtcagagttacacatctgatgagtgacagagttgggactagaactcagattgcctgactgcccagtgctccttctgcaatcatgcaacctaaggagagaacattttctttaaaaattaggtgtttttttcaatttctggttcttttttatttaaaatgctgtgtaattattagcatagtaaaatgactgtaatttcaccgtctttcccgaagaatgtcttgcaatagattggaaagtcaattttgtgtttttaaattagagacaggttcttgctatgttgtccaagctggactcaattcctgggctcaagtaatcctcctaccttagcctcccaagtagctgggattacaggcatgagccactgtgcctagctttgcctttgtttttctgtttttcgagatagggtctctctctgttgcccaggctggagtgcaggggcatgatcatagctcatgtaaccttaaactcgggttcaaacaatccttcagccttagactcctgagtgactgggactacaggtgcatgctgctataccgggataatttttatttatttatttatttttttgagaccgagtttcactcttgttgcccaggctggagtgcaatggcgcgatcttggctcaccgcaacctccgcttcccgggttcaagcgattctcctgcctcagcctcccgagtagctgagattacaggcatgcgctaccatgcctggctaattttttttgtatttttagtagagacggggtttctccatgttggtcaggctggtcttgaactcctgacctcaggtgatccgcccgcctcggtctcccaaagtgctgggattacaggcatgagccaccccgcccggccccttaaatgttttttgtagagatggagtcttgctgtgttgtcagggctggtctggaactcctgggctcaaatgatcctactgtgttagcttccctagtagctgggattacaggcatgcaccatcacacctagttcagattgggaaatctttacagagaaaattaagttctgttttcttaggaaagtagcatatttatattctttgtgggtcatgtgatgagatctcaaatacctgattgttatagttttctaatcttggctttctgagaatgtagactaccctaatttttttttttattttttttttgagactgggtctcagtctgtcacccaggctggagtgcagtggtgtgatcacagctcatgtaaccttgaactcttgggctcaagtgatcctctcacctcagcctcttgagtaactgggattataggcaagcaccactatgctgtcttctaccctaattaataagggggattattgttcagttatggcaaatcacataccacgagaacatttagaagcttcattctatttgggtggttttctgagtcatagatttttttttttttttgagaaagggtctgtctgtcacccaggctggagtacattcgtgcaatcttggcttaatgccacctccgcatcctgggctcaagccatcctcctatctcagccccaccaaatagctgggaccacaggtgtgtgccaccacgcccagctaacttttgtattttttgtagacacagggtttcaccttgttgcccaggctggtcttgaactcctgggctcaagcgatccacccgcctcagcctcccaaagagctgggattacaggcatgagccactgcgcctaatgttctttctttatacaaacctattcatggtgacatatttaaaaaccatttaaggggccgggcacggtggcttacgtctgtaatctcagcactttgggaagccaaggcgagaggatcacgaggtcaggagattgagaccatcctggctaacaccgtgaaaccctgtctctactaaaaaaaaaaaaaaaaaaaaaaaacaaaaattagccgggcgtggtggcatgtgcctgtagtcccagttactcaggagactgaggcaggagaatctcttgaacctgggaggcagaggttgcagtgagccaagatcgtgccactgcactccagcctgggcgacagagcgagattccgtctcaaaaaaaaaaaaaaagaaaaacaacaacaacaaaaaaccatttcaggctgggcatagtagctcatgcctgtaaattccagcactttgggaggccgaggtgggcagatcacttgaggtcaggagttcgagaccagcttgaccaacatgacaaaaccttgtctctactaaaattacaaaaattagctgggggtggtggcatgcgcctgtggccccagctactaggaggggtgaggtaggaggatggcttcaaaccaggaggcggaggttgcagtgagcaaagatcgcaacctgcactccagcctgggtgacagagtgtaaccctgtctcaaaaaaaaaaacctgaaataataaaaacaaaacaaagaaagaaagatttaaaagatgtttaattcaaaataaaatttcagattaattttttccctgttgagatcaatgctagacccacaagagatttaaaaaaaaaaacttgttcattgatagaacaaatatatagaacattgcaattcttgcttatgagtataatgagatttaaaaggtaatccaacattatgctgttccataatgtttttagaatgcccatctgttaattattcagtcttattttggtaagggtaagactcccgcgttatttgcttaaaataacgcacatgtgaataaatgtcatagataattcacctgtgttgatgctatttgtaaaagcaataaacacaaaattagattgggtgttgtttaattacaatttttggaaatctcaaattcaatacagaggtcctctgattatatcctggatatgcaatagtcagtttctactggttgagtgagggtatctcttcattgtagacattaaactgtagtgatatattgggagaaattagttctggtggctttgagtggtttcaaaaagaataattgggacactgttctaaacagccaacactgtctagctcagaaacaaatgactgcatgtgtgacatttctaaatggtgacatcttcaaggaaccctctaaatggttacttattttaagcttcaggttatggaggaaagaaaaaattagtcaggggatattagttgttaatggtcctagtatgaacagacagaaactccaaataaagatatcatttatttccaaaagatgtaactaagaggaaatgcaaaaaaaaaaaaaatgcaaagttcagtaaagtgaatagctgctgtactaattgtaaatttcactctttgaggtcttgggtgcctttaaccgattccatttaggcagaaagcacaagcaaatatctcttgttgtaaacaaagcaacaaatttaagttaatgctaatgtgttcacagccagagccaaaagtttttcagggttattataacacactgggctctcagcccatccatctaaatgtccaaagtacactaaagttatggattggcccattgtatataccatcccacatgagagccagatgctactgtttactgtgctagtgacttagccagattcaatgtgaaatctgagattactgtttggggtccatggaagttatagatggatttttctgatcatggatttaggcttctatacttcgatctgttttgattaatgccgatttttttttaaggacaatcttttaaacctaattataccctaaactttagatggagagtttccttgtaaaaattgttttcatttattgtctttggaccttggatgtgttgtaggtcttcagcatctatctatctatctatctatctatctatctatctatctatctatccgtctatctagagggagacagggtcttgttctgtcacccaggctggagggcggtggtgtgatcatagcttactgcagtctcgaactcttggcttcaagcgatcttccagcctcagcctcccaggtaactaagattacaagactacaggagagtgacaggactacaaccatgaccagttaattttttaagttttatttttctggagacagtgtgttgttctgttgcccaggctggtcttgaactcctggcttcaagcaatcctcctgccttagctttccaaagtgctgggattacagatgtgagccattgcaccccacctttagcatttttttttttttttagacggagtcttgctctgtcacccaggctggagtgcagtggtgcgatctcagctcactgcaacctccgcctccctggttcaagccattctcctgcctcgcctcccaggtagctgggactacagacatgcgccaccacacctggctaatttttgtatttttagtagagatggggtttcaccatgctggccaggctggtctcaaattcctgaccaggtgatctacccacctcggcctctcaaagtgctgggattataggtgtgagccactgcaccctgcttttagcatatttttattctttgttttgagcatggaaaagaagccatggaattctattgcatggcaaccacactagaaaatgtaattataatgcagattttaagatgatttggtaaaaaaaccagttctgtatatattgatttagaaaaatactatccactgtcttaagaaaatgtggcacatatacaccatggaatattatgcagccataaaaaatgatgagttcatgtcctttgtaggtacatggatcaagatggaaaccaacagtctgagcaaactattgcaaggacagaaaaccaaacatcacatattctcactcataggtgggaattgaacaatgagaacacctggacacagggtggggaacatcacataccaggcctgtcatggggtggggagagggaggagggatagcattaggagatatacctaatgtaaataataagttaatgggtgcagcacaccaacatggcacatgtatacatatgtaacaaacctgcatgttgtgcacatgtaccctagaacataaaggataataaaaaaaaaatttaaaaaaagaaagaaaaagactatccactgtcctcagttggaaagaaaatttcatcattcaagacccagtattatcagattttgttgacatagttagatcccttatcccttaaccctatctgatttggtttatgtccttttcatccaactaaactggtttttgaggaagtatcacaagtaatgataatactaccaataatactaccaatactacaaaagcaactgttgtaggggaggaaagatttcttttcctcatccattgctaagttcatggctgaggcacctataacaaaagacagattaaccagagaaaatcataaaccaaattcacttaattaatatatttacatgacataagagccttcagaaatgaagacccaaagaaacaggtaaatttgtacatttttgtgcttaggtttgatgaagagtagacagttgtggaaaagtatgattggacaaaggaggtgtgatctaatggtaataaactgggggacttagctagacctgtgtattcatatttgtctctgtgtccctgtgcctttggagataagaacattcctttcctccatatatagggtgggcacctctccatgagagccttaattacttatttcacaggaaggtcaaagaattgtgttttggcttacttcaggggagaaggtcaacgagtaacttttctgcttctactgcttcctcaaatgccaaagtgccatattttggggtagcaggtcctgaatcccatcactgctaaatgctgagcactttccatatgcaagaccctgtactaatacttcgtttatttagggacatttcacagatggtaagatgaacttgccccaaatgtgtgacttgtcatttgagaatccagtcagtccagactttctaagtctaaggcctatctcataacctgttgttactattttgactataaatttctatagagttgtgtagtctgttttgcttcagacttcgaaaaccacttgtgacatctgtaccaaacacagtgacaatggtctcactgcaacctgaaaagccagttgtccctggaacagaagtaacactttccctaccagcagtaacttttgaagaatcttcaggtgcagctatttgtcttccatctgtgaaaccttttgttacatctactgggaccacatctgacaagcctgttattggcactccaatgcaaatcaaacttgcccagccgggccctgtcctttcacaaccagctgggattccacaggcagttaaagtcaagcaactagtagttcagcaggcttcaggaggcagtgaaaaacgggtgaccacacttacacattcctcagcattgaccattcagaaatctggatagaagacaatgccagtgaacaccataatacctaccagtcagtttcttccatcttctgttctaaagcaaattactctgcctggaaataaaattctgttgcttcaagcatcttctactcaaaaaaataaagtaaaagagaatggaacaatatgcttcagggatgaagatgacatcaatgatgtgacttctatggcaggggtcaaccttaatgaagaaaatgcctgtgtcttagcaacaaactctgaattggttggcacactcattcagtcatgtaaagatgaaccatttctttttattggagttctacaaaagagaattttagacattggtaaaaagcatgacattacagaacttaactgttgctgtgaacttgatcacccatgcaacacaggaaaaattatgaagccttctagaaaaactgactgcaattgctcagcattgaatgactacttacaaggcaagtgaaaattacatcctgtgtagtgataccaggtcacacctcaaatttcttgaaaagctggatcaattggagaagcagagaaaggatttagaagaaagagaaatgttacttaaggcagccaagagtcattgtaataaagaagatccagaacagctgagattaaagcagaaagccaatgagttacagcaactggaacttgaacagatacagcatagagatgctaatctcacagctcttgcagctattggaccaaggaagaagagaccactagaacttggaagtgagggcttaaaagacaaccttcttgcttctgggacatccagcctgacagtcaccaaacagttgcttcatctaagaatcacaagaatctgcctcagggacttgatattttgtatggaacaggaagaggagatgaaatattctcgagctctatacctggcccttctgaagggaccactctactctccatccagatccttgcaatttactgccaaggaagacacaaagagcattgttgcactgttctgaaatttcgattcctggaacataatcaccaatatgaaagagcaaacaaatggaaaaacatttcatgctcgtggataggaagaatcaatattgttaaaatggccatactgcccaaatcaatttacagattcaacactattcctatctaagtgacaataatattttttacagaactagaaaaagctattctaaaattcataaggaataaaaaaagaggccgaataaacaaagcaatcctaagcaaaaagaacaaagctggaggcattacactgctgatcttcaaactataccacaggctgcaataaccaaaacagcatagtactggtacaaagacagacacagagacgaatagaacaggttagagaacacagaaataaagtcgcaaacctacaaccatctgatcttcaacaaagcctacaaaaataagcattggggaaaggattccctattcaataaacactgctgggataactggctagccatatgcagaagattgaaacatgactcctttctttcaccatatacaaaaatcaactcaagatgaattacggacttttttttttttttttttttgagacagagtcttgctctgtcgcccaggctggagtgcagtggtataatcttggctcactgcaacctccgcctcctgggttcaagcaattctctgcctcagcctccctcgtagctggaattaaaagtaccccccaccacgtccagctaatttttgtatttttagtaaagaggggggtttcaccatcttggccaggctggtgttgaattcctgacctcgtgatccacccgcctcggactcccaaagtgttgggattacaggcgtgagccaccgcgcccagctgaattaaggacttaaatataaaatctgaaactgtaaaacccctagcagaacacataggaagtacaattctagacacaggctctggcaaagatgtcatgacaaagattccaaaagcaattgcaacaaaacaaaaaattgacaaatgggacctaattaaagtaaataacctttgcacagccaaggaaactattaacagagtaaacagacaacctccagaatggaggtttgcaaactatgtatccagcaaaagtctatgtatccagcaaacgtctaatatccggaatctataaggcacttaaagcaaaaaacaaacaaccctatttaaaaatgggcaaaggaggctgggtgtggtggttcacacctgtaattctagctctttgggagatggagtcgggtggatcacttgaggccaggagtttgagaacaggctggccaatgtggtgaaaccctgtctctactaaaagcaaaacaaaaattagccgggcgtggtggcgcctgtaatcccagctatttgtggagctgaggcataagaatcgcttgaacccaggaggcagaggtttcagtgagctgagatgatgccactgcattccagcctgggtgacagagcaggactctgtctcaaaaatataaatgaatgagtgaatgaatgaatgaatgaataaaatgcagtttaaatccaatgtttgtttgttggttttatgtctagataatctgtctaatgctgagagtagagtgtttaagtcctcaactattactgtattagagtctatttctccctttatatctgagtgttccagtgttgggtacatatatatttacaattatatttatcgtatcctcaggcctagtgcagtggctcatgcctataatcccagcactttgggaggcgaaggcagaaggattgctttgagaccaggagttagactagcctgggcaacatagtatgagcccatctctacaaaaaaaaaaaaaaaaaaaggaagggcaaagacatggagagacacttctcaaaagaagacacacaggcggccaacaggcatatgaaaaaaattctcaaaactaatcattagagatatgcaaatcaaaaccacaatgagataccatctcacactagttagaagggctattattaaaaagtcagtgctgggcatggtgactcacacctgtaatcccagcactttgggaggctgaggctggcagatcacaaggtcaggagatggagaccatcctggctaacatggtgaaaccccgtctgtactaacaatagaaaagcaaaattagctgggcgtggtggtgggtacctgtagtcccagctacttgggaggctgaggcgggagaatggcgtgaacccgggtggtggagcttgcagtgagtggagatcgcgccactgcactctagcctggataacagagtaagactccgtctcaaaaaaataaaaataaaaaataaaaaaaaagtcaaaaaataacagatgctggcgaggttgcggagaaaagtgaacacttatccactgctggtgggaatgtaaactaggtcagccactatggaaagcagtttgaagatttctcaaagaacttaaaagagagctaccctttgacacagcgtctcatcactgagtgtataacaaaagaaacataaattgttctaccataaagtcatatgcacacatatgttcattgcagcactactcacaacagcaaagacatggaatcaacctaaaagcccatcaacagtggactgggtaaataaaatgtggtacatacacaacatggaatactacagtcattaaaatgaatgagatcatgtcctttgtagcaatatagatggagccggaggccattatcctaagcaaattaacacagtaacaggaaacaaaataccagatgttctcatttataggtggaagctaaacatggagtacaaatacacatggacataaagaagggaacattagacactggggcctacttaaaggtggagtgtgggaggagagtgaagattggtacttatcggttactatggttattacctgggtaacaaaataatctatacaccaaacccctgtaacatgcaattattattattatttttttttgagactgagaggtgacaacgtgctaacagcccttgctcgctctcggcacctcctcaggctacggcatccactctggctgcgcttgaggagcccttcagcccgcagctgcactgtgggagcccctctctgggctggccaaggccaaagccagctccctctgcttgcagggaggtgtggagggagaggcgtgggcaggaaccggggctgtgcatggcactcgcaggccagcacgggttccaggtgggcacgggcttggtgggccctgcactcagaacggctggctggagccaccagccccaggcagtgaggggcttagcacccgggccagcagctgcggagggtgccccgggtcccccagcactgctggcccacctgtgcctcgcttgaattctccctgggcctcagccatctcaccatagggcagggctcgggacctgcagcccaccatgcctgagcccccaccccctccatgggctcccgcgtggccagagactccccaatgggtgctgccccctactctgcagcgcccagtcccatcgactgcccaagggctgaggagtgcgggcacgcggcgtgggactggcaggcagctctgcccacggccctggtgcaggatccactaggcgaagcaagctgggctcctgagtcgggtggggacatggagaacttttatgcctagctaaaggattgtaaatgcaccaatcagcactctgtgtctagctcaaggtttgtaaacgcaccaatcagtgctctgtgtctagctaatctagtggggacttggagaacttttgtgtctagctaaaggattgtaaatgcaccaatcagcaccttgtgtgtagctcaaggtttgtaaacacaccaatcagcaccctgtgtctagctcaaggtttgtaaatacaccaatcagcaccctgtcaaaacggaccaatcaactctctgtaaaatgggccaatcagccctgtaaaatggaccaatcagcaggatgtgggtggggtcacatgagggaataaaagcaggctgctggagccagcactcctcgggtcctctttcatgctgtggaagctttgttttttcgctcttcacaataaatcttgctgatgctcagtctttgggtccacgccacctttataagctgtaacagtcactgtgaaggtctgcagcttcactcctgaagccagcgagaccacgaactcactgggaggaatgaacaattccggacgtgccacctttatgaactgtaacactcattgtgaaggtttgcagcttcactcctgaggccagcgagaccccaaacccaccagaaggaagaaactctggacacatctgaacatctgaaggaaaaaactccagacgcaccatctttaagaactgtaacactcactgcaagcgtccatggcttcattcttgaagtcagcgagaccaagaacccaccaattccggacacaagatggtctcattatgtcgcgcaggctggagcgcagtgctacaatctcaggccactgcaacctctgactcccatgttcaagcaattgtcctgcctcagcctcttgagtggttaggactacaggcgtgagccaccaacaccaggctaatttctgtatttttagtagagacagggtttcaccctgttaaccaggctgggttctaaatcctggcctcaagtgatccgcctcccttggccttccaaagtgctgtcattacaggcatgagccacagtaccgggcctgtagggtgtaatttacttatataccaaacctgtatatgtacccctgaacctaaaataaaatttggaagaaaaaaatagattttgcatcattttacagtcacaaaattattttattttgcccaggaaagactattgtttcttcatattgtatactctgtgcttactaaaattttgttgatatggataaaagcagagccattcaaattgtaaagttatttgtagagtagtgctgcagaattgtaaatgcctcatcctgatattgtatgatattcaatttcagaataaactaagtcctgtaagaacatttggcccagatgttactaaaaataattgttgctctaaaatttcacacagagaataacattccatggtcttctactgttatgcactattgcttcatttttccatttgggattgaaaaggagaaatttagaaaaatattttaaaaggatatatattcttgctttataacctccaatattctgcttcagttaaatctaaattgttgtaaagagacaactgtatacttgtgtttaagcactcatctgattaaattgtttgaaatttaagttggaaagagacaagtccacctaaagacagatagtaggtagcatactatatgttaggacatggagctagtacaagtaggttggaaggacagaaagtgatctgtagcagctggatgggaagactagcttcgtttggacatgggacagtttgaaaggtggtcttactttcagtttgaaccacaagagaagcagaaagaggcttggttgttctgatagtgaaggaaattccttagaagttctactgaagaaagccttggaatacagaattataaaaagttttaaacagaataagccaaacatgaggtagtgggtaaggggaggaaataatacgctgaaatgccaatctttagaccatagtagctctaaaatctagaccgctagaatattggattgaacagacagctggctggagatatctgattttagagatgtcagggcaatttttgcaagataaatctgataggtcaaaattagagtagtttaagcagtgactactctcatttacacttaatgattagttttgatgatacgtgatgcacctaggtgcctatatattttttcttttaatttatgaatgatttatgtatttttttttttttgagagggagtctcgctctgtcccccaggctggagtgcagtggcgccatctctgctcactgcaagctccgcctcccgggttcacgccattctccttgctcagcctccccagtacctgggaccacaggcgcccgacaccacgcctggctaattttttgtatttttagtagagacggggtttcaccatgttagccaggatggtctcgatctcctgacctcgtgatccgcccgcctcggccttccaaagtgctgggattacaggcgtgagccaccgcactcggccggaatgatttatgttttaaaatacataatagactgtcccaaattcaaaaggttcaaaaggataaataagtctttctttatccctggtgctccagttctcctcctcagagacaactgctgtttttaattccatgtgtgccttccgagtatattgtatgactatatatacatagatataacttttaaaacacaaattgtaacatactacatatgctattctgtgccttttttcatttaacatgtcttgaagattattctctgtcagtacatacaaagttgccttatgctttaaagaaatgttttattatgaaaaagttcagacatacacacaactagaacgtataatggacccccaggtagccattacccagttcaatgcatatatcaatattttgacattcttactatgtattagatgatattaaaaattattaactttgttaggtgagatagtggtttggtggttatatttaaaaaatgttcttagagaagcatcttgaaatatttatgactgaaatgatatgttctctgacgtttgagatttactttaaaatatatcagaagaaaaaagtatgcgtggaaggaatagcttgaaccaagattggcaaaatgttgaagttaagtgcatgcagattcattatatcattttctctgctcttgtatatgttagaaaatttctataataagaaatatatttgccaatctggttctatctatagctctcccccttttttggaagtatttaaaaatgaatcctagatattatgtaatttcatccataaatacttctgtatgtttttctaatattataaggacttaaaaaaacactacaaagccattatcatatctcagaaaattaacagtaattcttagtataatccaatatccagtccattttccaattgctctgattttctcaaaaatgtctttttgcagttggattgtttaagagtcaaattaggtccacatatggcatgtcttaggtctttcttgatctttaataatcagatattttaaaaaatcagatctttaaaaaacagacacttgtttctttgagaaactggctcatctattctgtagaaggccccaccttctggatttgactggtcgtttcctccaggtgtggttcaacttgttcctctatcccttatatttgagtcttgattagatttaggttcagtatatttgccaagactccttcatagggggtgcttgctctgctcttcctgctgtatcatctcaggaaacccatatttctcatgtttcactttgagtgatactaagatttaggagaggatttgggtggtgtcagcctcatctaccatcgacatttcacttgatgtttttggcatgcagtgattattaatgactgagtccattattccattagggattacaaaacgatttttaaattcttacattctgtttatacttattacttggaattgttctacaaagaagtttccctcatgactttttgataaaccaaagtatacagttggcttattctttttaacaaccacatagcattttattctactataatttaattggtcatctattatttaaagtatttgctctttttggtttgtttatattttttccaactgtattttctcatatacttatgcatttataatgaatagtaaactatataattttatagttatattttaatggaaaaataattatcagactttttcactctgtgtgtatgaatttagtataaatataagaggccagacctgtattttaacccttggttggttacttatttatcatatgatgatggggaaaattatcctttcttttttctttccttcaatttattagttctaagcctcattttcttaattcatatactgagaataataaccaatttctggatggttttaaggattaaattaaaaaactatcaaaatgcttggtaaagttcctagcatagagtaagtgctcattaaaatgaactttctgctaaaatttgaggaatagatggaatagcacatgcaaattctgttggatagggcttagcaaatagatgttcaataaatagtgccacttttctccatttcttaatttttccccaatcttagtagtaatgaatattactttttttccctaggctgttttcaggagtaataaataaatagaccttaggtgccctgaggtttttgctgtgaagggtcattctgttggcctttatggagacttatctggaattgctgggtcacagctttctatcctgggaggctgatatggtttggctttgtgtccctacccaaatctcatctcaaattataatccccatgtgttgaaggagggacctgatgagaggtaattggatcatgggggcagtttcctccatgctgttctcatgatagtttgtgagttctcatgagagctgatggttttaaagtgtggcacttcctcgctctctctccctcctgccaccttgtgaagaaggtgccttgcttccccttctgccatgattgtaagtttcctgaggcttccccagccatacagaacctcttttatttataaattacccagtctcaggtagtatctttatagcagtgtgagaaaggactaataaagagaattggtaccaaggtagtggggcactgctataatgataacctgaaaatgtggatgtgactttggaactgggtaacaggtagagtttgaaagagttttgagggctcagaagaagacagggagatgaaggaaagtttggaacttcctagagacttgttgaatggttttgaccaaaatgctgatagtgatatggacaatgaagtccaggctgaggtggtctcatatggagatgaggaacttattgggaactggagtaaaggtcactcttgccatgctttagcaaagagactggtggcattttgcccctgcactgaagatgtgtgaaactttgaacttgagagagatgatttagggtatctggcagaagacatttctaagcagcaaaccattcaagaggtgacctggtttttcctgaaagtgcacagtgatatgtgctcacaaaaagatgacttgaaattggaacttatgtttaaaagggaaacagagcataaaagtttggaaaatttgttgcctgaccatatggtagaaaagaaaaacccattttctggggagaaattcaagccagatgcataaatttgcataagtaacaaggagccaaatgttaatcaccaagaaaatagggaaaatgtctccaaggcatgccagaggtcttcaaggcagcccctcccatcacaggtgcagaggtctaggaggataaaatggtttcatgggccaggtccaaggctgctctgctctgtgcagccttgggacagggcaccctgcatcccagcagctccagttccagctgtggctaaaagggggcccatgtacagctcagtctgttgcttcagagggtgtaagccccaaaccttggcaacgtccatgtggtgttgggcctgtgggtacacagaggcaagtgttgaggtatgggaagctctgcctagatttcagaggatgtatggaaatgcctggaagtccacatgaaagtctgctgcagctgcagggatggagccctcatggcgaacctctgctggggcaatgcagaagggaaatgtgggtttggagacctcacacacagtccccactggagctctgcctagtgaagctgtgagaagagggccaccatcctccagacccaagaatggtagatccaccaacagcttgcactgtgtgcctggaaaagtgcaggcactcaatatcagcccatgaaagcagcctcaggggctgtaccctgcagagccacaggagtggagctgcccatggccttggaagcccaccccttgcatcagcattccctggatgtgagacatggagttaaaggaggttattttggagctttaaggtttaatgaccacctggctgggttttggatttgcatgggtcctgtggcccctttgttttggccaatttatcccatttggaatgggaacatttacccaatgcctgtacctcattgtatcttggaaataacttgcttttgattttacaggctcataggcagaagggacttgccttgtctcagattagactttgcacttagacttttgagttaatgctgggatgagttaagactttgggggactattgggaaggcatgattggtttcaaaatgtgaaaatgacatgagatttgggaggatccaggggtagaatgatatggtttggctctgtgtccccacccaaatctcatcttgaattgtagtccccacatgttgagggagggacatggtgggaggtggatcatgggggcagtttcccctgtgctgttcttataatagtgagtgagttctcatgagagctgatggttttaaagtgtggcacttcctcattctctctctctttcctgccaccttgtgaagaaagtgcctgcttccccttccccttctgccatgattgtaagttccctgaggcctccccagccatgcagaactgtgagtcaattaaaccttttttatttataaattatccagcctcgggtagtatctttacagcagtgtgagaatggactaatacagaggccctgctgcatactgggaaatgcctgcttttcaggcagtcccaatctggaaaggctcagatggaatgcaaacagcacttcatttaaccctgagttgtggaactagagtgaatgttcctctccttctctctcttggacttcctacctcatccttggtttccagttcattgttaggattagaaagttatcctaataggctgggcgcatggctcatgcctgtaatcccagcactttgggaggccaaggtgagtggatcacctgaggtcaggagttcaagaccagcctggccaacatggtgaaaccctgtctctaataaaaatacaaaaaattagccaggcatggtggcgcatgcctgtaatcccagctactcgggaggctgaggcaggagaatagcttgaacctgggaggcagaggttgccgtgagtcgagattgtgccactgcactccagcctgggtgatatgctaaattatcttttctagtaactcacaatactaccgtttctcctgtgcctttggtatttcactttctcataggttcttcatctttgtaacatcttaggccttagctttagtcttcaactttcccctatcaaataatggccaatttttcctctttcctctgtggacttctggcatcttctcttctgttcctttctcccctccttttgtaatctttccattctcagaagcaccatctgtccatgaagacattttgcacccctcgtttggtaacactttgtccatgtgatggatagagctagcctttctcagcattacctcatttctttttcctatgtttctaggtaatagctgacacatactgtactttcattcacaggtcccagttttaaaatatacagaaggcagaaaggttaagtgatttgaaaatgtgtgctgaagataatatagtatcagcactgtaaactggaaaagaacaattggctccctgatgctcaggatcaggcttttttttttcaatgaaatctgctgatggagcatacacatattttagtgacagcctggaaaacaagagccatttttggtcattctagtgcattccttctattttgatgtaaggttattatgaatatgtgctgagtctttaaagagtagatgataccaaatattttgacaaattcgaatggttttcctaatgtattaaggtgtggtttggataaaatgaatgccattctgtgtattaattcagatttggagcatcaaaaactatcacaaaatggcactgcttctcaaataaaaggtgaagtgtaaagtaaagggaaaacatcaaagaacaaggaagcggcttattttttcaattgttttacaattaatccatgatatgtcagttcagatgtcaatgaccagctttaaggcaataatgatccatgtctgctctttatcctgggtatagagattttttgattgaaggatgactttaaagagaattatatgcaacagttgaaattttgccttgcacattctttgtaccatatttttccttcagggaaaaacctcttaaaaatgcctatttgtaatctttcttggccaggtttgtactcttctgtatgttgagctatggcctattgtttccattcattcgataataattgtgattcatttgataataatttattaagcaattactatatgctaggtcttgtgctatgtgctggaggtacaaagatgtataggacatggtcctggtccttgtccttcctctaacagcaggctttagatcaaacatctctgcttgaattaacagggtttcccagtgtggtttgtagatcaactgcatattcagctactgaatcagaatcttgggatggacttaggaatctgtattttcatctgatgactcttatgcactggcccaggacatggtaggagtgaggtagttaatagggagatacagtgatacagcacattcctcagagagagcttccattcagctttgatatttctgggagtttcctcagaaggggaacaatttgcctggcttgaaggttcctctggaggtggcaggctgaagtgctactgtaaattctagaatggtgcaaattctgtcctccagaaaatcagttctggatcaaggggcagattctgggttaggttgggagtgctggatgcggggataagggccacaggcttatatacccagagggtccataatgtagcccctggggtgtccaaagaggaagaatatagctgacagctaatacaattaggattcatttagggacggaaaaatgcaaagataaaacaataagagttaacacatatacaatgtcttatatgcctaagtgctgtgcaaagcactttgcataaattaattaatcctaataataatcctatgaggtgagtctagtagcatcatcctcattttacagataaggaaacagagaagttaagtaatttgctcaaagtcacacagtataagccaggattccaacccagggagtgtgatgcagaatgtaagctcattcagctgcctcttagaagcatcatcatttaaaatgcagaaagtacagtgggggtttaaactcacatctttcctgctgttatatacttgagtatccatatctttcagcttttcaccaaaataatactttcccttccccacaaggaacacttctggaagtcctgacaactgccttcttaaatgccttcagggctggtttcttctgttttagagaagaaattacacccttccctttgctgttaccttgtaatctagatgcatatgaaaagcccctttacagcagatctggtccttcactgcctgaagactggatgcactatttttagagacaaagccacaatatcttagtctttaagcaagtgtgtgatacaagaaaacgcacagtgcatatttagaaggctgaacaacttttcagtttcttttttaaaattttaattgcagattgggtgtctgaaggctttcatgttatacgttcagtaaatatgggtcattaataaaaagttgaaaaaatgttaacaagggaaaatacatttgaggcaagtctgagcttccaacagggagagttatttgacctgagttctttttcaggagctatgtaacattattacatattgagctgatgatagacatctggcatgcaaacagatctgaaggtgcattgaatcagaaggaaaactgtggactgtgagatggttctctcttattctgtagaatgaagagtgagaggctgccatttcttggaaattatgcccaaatggcctgacaaattgggctttatcctggcttccttgtttggagaattaaacccacaaaacattatcttactgaccgaatcattcttaggtataggtttgctccataaactcttactcttccattcaacaaacaccctcgcctagctgtgtccgcacttgtagccctaccacagggcaaagttacttctagctatggacagatacatgaagttctcacagaaatgactgttgaccccactgaaaatccaaaaacaaattatttttattaatttaaagtaattattttcccattaaaaataatatgtgcttcttattaaacaaatccaatagaagaagacgtctttgaagaggtgaatgatcttcacccaaaattattttctttttcttttcttttttttttgagatggagcctcttgctctgttgtccaggctggagtgcagtgatatgatctcagctcactgcaacctctgcctcccaggttcaagtgattctcctgcctcagcctccccagtagctggaattacaggcgcccacaaccacacctggctaatttttgtattttagtagagatgggggtttcaccatgttggccagtcttgtctcgaaatcctgacctcaggtgatccgcccacctcagcctcccaaagtgctgggattacaggcgtgagctaccacgcccggcccaaattattttcaatgttgacaaatatctggtgcttctcttaaaataacattcccactgaagaaagcaatagtttaaatctctgaaaaatagagtaatgattcgtaagagttattcctttaccttaatccagtggtccccaacctttttggcacgagggacgggtttcatggaagacaatttttgcatggacttgggggcgaagaatggcttcaggatgaaattgttccaccacagatcatcaggcattagttagagattttcataagaagcccgtaacttagatcccttgcatgtgcagttcacaatagggttcgtgctcctatgagaatctaatgccaccactgatctgacaggaggtggagctcaggcctaaagctcgctggcccactggccgctcagctcctgctgtgcggcccgcttcctgttgggccgcagactggggactggggaccgctgccttaatctattaagcaattatattagtttcttgttgctgctgtaacaaagctctatttaagacaaaagacatttattatcttacaattagagatcagaagtcccaaatgggtttcactagggctgaaagcgaggtgcccgcagggctgtgggctctctgaaggctctagggagaatctgttttctttccttttcctctagttgcctggggacaaccgtcttcaaagcacaccactccaacctctggttctgttgtcacatcaccttcttcctctttgactctctttcctttctcatataaggagccttgtattacattgggtccacctggacaatccaggataacctccccaactcaaaatccttaatttaatcacacatgcaaagtcccgtttgccgtataaaatgacatttaagggttccagggattaggtgatggacatgtttgaggagttggtgttatttagccttcacggagatgtacaactcagatttgctaaaagattttgtgtactagaaatttatattaaattagcacttcttcctcaactctttttttctgttttcatcccaagtacccaaagctccattaagatctcacatttgatttatctgagaactctcaacagtggtatgaagaggctgcgagaacaacattttccaaacagaaactctagtggcccagcaatgttaggaggtgttctatgttaaaaagtgttctgatttagataagattaaaaaacaaaacattgcatgtgccattccacccaccttcatctttaatacacattagcatatggaaaaggtactgagaattctattgtctgtgattcccaagtgcgtttttgcacttgggaaaaaatgcaatttttcccaaaatgaatgaatttcccaaaaaatgaaaattttttttctttttctctcttttttagaatgcttatggatcacctcaaggaataccaatgtattatgtttgagaaatgttgtccttaatgtattatagtttttcgttctaaaacttaactacgttaccctgaaaaaataaatacaaaaggcatattggagctgattctaaatatcttctaaatgacagctctcctgtttaatcttccttctacctatgcagaacttaggtttttttggactttaaagcaattgactctcaaaacctaatgctacaaaaaccttggttctgtaaataagtatttagaataatattatatgcatacaacaattttgtgctagacaacacaaaattgttctggaaaaagtaagataatcctttgaatgtttttcaagatgtgtggaaaaatttactattgtgaatagtatgtcagactcacaggactgaaatatatcttaaaaagctgtattcaccatttccctattttgagaaggtaaagtggtcgagaatggtacttaataacttacatgattcacctgacagctcccgacaatggtgtgaagagggccttagccttctcacctgggttcatgattggactacccttagcatagggtggcaatgcaatctttgccagataagactttctttgcaccttccttgtccctttcttatgacaacgattatattttatcatacattattacttacatgttatcgcttatctgcccaaagtaaagctcttgaaggcaagggccataactgtacccctcatgaggcctggcttttcctttatcaggaactgtgccaatgtttgcaaatgagtgacttaggatggaaattttagcaatgtcaggtgtgtacttcaatcatccatcagttgatccatccatgtatacttttttctacttaaagtttaagaaactcacaaaaatatatgtagaacaaggagaaagttaaatcaaaataggtaaaatacctaaggcaaaggaagacaaggtttggaaagtaaaatggatttaggagtgagcctagttcttaaaaatatttgtcataaaattttatgcatctgtagggggaggacattgtttggtgttaaggttactaggagccagtgaagaaagcaattggttatttgatttttagtatccataaaattaagatgtcagttgctcacatgaatcatagctattcctagaaccagaatcaatgagaaaatcctctcatgggatatcagaaggagtttgctgtgtaatataaggaataacgtaaaaacatattcaacttatctttacaccaagcacagcaacatatttcagagagaaatttcttatatcagtcttggtttatatgatagtatccccactgtgacgacgtaacttaaataagaagtacagctgtagaaaggagtagacattggttcataaaaatcctaccatgctaacaaaattgcaaaacacttatcaaaactttttattttggtaaaatctgtacttaaaatatgagtataaaagttcaccagcaagtaaaagaatgtggagtaatgcaacatatattgcctaattattagaataaataaattgtaatcaacagtataatcaattttctgaggttagggctcaaatattgatgaacattatgtacttaggtgtttttttttttgacttttccctgtatatataacttcaggatgcagcaaataggactagttattaaacaacagggacaaagttagttaaatatagaatagatttcttccttaggttgcaatttaagcttctttttagtagaaggaaactgactctagtgagatttcatagataccaattatcccagaaaatgatgacctaagaggaaggtgtgagaatagaaaccaattaattaagggcaggtacgtggagccctctcctggggttggggaagttgaatggaagtgttctaactgcagggatgtgatagatggaaatcgtgtgtcttctgggaaattaactgacattcacttcccttcctttgtgtctgtgtgggtttaatattgccatcatgtaatagaggcaccaccaatgttagtttggaaatacctgtcaacgtacaagtatttactaaaaaagtttacagaaatgtagattctcaagttatttttaaatgttggtgattttcttgggatgttgtcttcacatcggtggttctggggtaggatcaaaacttaccttgacttccttccttatttctggtgttatgactgatgggcgtgcccaaccagatccaggacagtaaatacatcctcttatttggtttctaattcctttgagttaccatggctttactttgccccacacttaggaatttgggcaaacctgtatatgtttttctccatttcttcttacttcttgaaacagtagtctttcctaactgaatctgcttctttccttcctattaaatttttttctttctttcttttttttgagatagggtctcactttgtctcccaggctggagtgcagtggcacaattacggctcactgcagcctctctggctcaagggatcctcccacctcagcctcttaagtagctgggactacaagcgtcccaccacacctagctaagtactttttgtactttttgtagagacagggttttgctacgttgcccaggctggcctccaactctgggctcaatcgatctgccctgcttagcctcccaaagtgctagctaggattacagacatgagccaccgcacccaaccctattaacttttaataggccattcgtccaccctattacttcactgacattgttctggccaaagtcacgaaattcattagcttctttttaatctccatcttagtttccttctgccccattttatattcctaaatgggtcttcctttttgaaacactcctctcctctctcttgatctcttcctgtctctgtggttttccttcttttcagtctcatcaaagggcctctgctcaccttttagacattggctatttattattgtgctcctttaagtttcttttcttcttttcctgggtaatctcattcatcctcatgtttcaatatatgttgatgatccctgcatcagtcagagtgaggctaagctgctgtaacaaagaggtagatgggtcgttttgcccatgaggtcatcaaagaactcagttttcatctctcttgttgctccaccattccctaatgtgttatccttatctacaaaatccggagtagtttagcagcaccatgtctgtgttccaatatccaggaaacgaaggtcaagacttccctcctgaggaagtggtaaagaacttgtacacaacagttgtgctgaaattacatcgatgaggatatagtcacatggccatatgtagcttcaagagaggctgggcaatcagtagtcacatactctgtgaaaactgtgagtataataacttcaaagaagaaaaagagaagggatagaaggacaaaattatggtctctgctcaaataccttcagcctccactctctgatacttcaggtctacagatccggctgctttgtgatgtcttctgtgtgtcctgtggatactgcaaactcagcatgtcaaaacaaaacaaaaactcaactagtcgttttctactaagtttgctgctcctaccacttttctctctctcagtggtattgttactcagttgttcgaactagaaatctcaatcattcttgattcttctttatatcttactctccacagaaaatttgttaccgagttctatttaatgcttgaatctatcctgctaccactgtctatgtctattgagaccctaaaaaaactctatcttgtattatttcagaagcctcctaactggtcttcagcgcaaaaattgtttccttaggtgacctgtcctctgcacggctaccatatttgtctttctaaagtacatatgggataacttcattttaaaatatctgtaatgaccttccatttgccactgtgtatcttctttaagtatgatttttagaaattgacctccttttcccccttaaaataaagcctatataaaccccttcaatatataaaaaaataaataaatgcagaacttcttgtatggcattgtccttagagggtagtttgaaaattgctggcctacaggattttaatttaggttacttgctagtaactagaaggcccttcacagtctagttctagctgactttcccaaacttacctgtagccagaattctcatcatcttccctgttctagtcacagtgcattgcttgcttctctcacacatggctggcacttataggtctatgtttgttcctgtttcttcagtaacgagtggtgtctgcccatcattcattgagcacagaatgactcacctgaaagagcatgcgatttggagcgaggcagacctggattaagagctcatctctgccttagtttcctcatcagaaaaatcaattattttattttattttaattaatgtatttatttgagacagagtctcactctgtcaccgaggctggagtgcagtggcacaatcttgggtcactccacctccacctcctgggttcaagcgattcacctgtagcttccacctcctgggttcaagcgattctcctgcctcagcttcccaagtagctgggattacaggtgcacaccaccaagcccagctaattttttatattttttggtagagacagggtttcaccacattggctaggctggtctcaaactcctgacctcaggtgatccacctgccttggcctcccaaagtgcggggattctaggcatgagccaccacaccctgccagaaaaatggatttaaaaagagaattacataaagtaccgaggccatagtagagcttcaaaatgtcagttccttccttctccttctcaaacgtcacttctactctgtaattttttgtgtgagtacaagaaaaaatagttttctccaatctgtgtttttatagcattttataatgcttctgttatataagttttattattatatttatttatgtttttggttgtctcacctgctggactttgagctccttgaaggtaggagtcttgacttactcacctttgatccttagtgcctagcaaaaatagacatggaataaatgcctattaaattgaattgcattgaattgaatagaaataaattaaagtagaaaaataaaggtcaacccatttccttggctttgacttaccttccccaaaagaatggagaagagtttgatgaatgtgtgaatgctgttttgtaatagaaagaagcagtcttctgattctgaatataaatagcaactgctgggctgtgaaacaatctgcaaaattgcatttatcctggagtgttttgttttggcatcagtgggatagaatgtagtttcatagtccatgtttattgaaccatgtaagggatttacaggagcatctgtatggaggccaaagttaaagtggggcactgtcccaaaaaagtgacatgtaagacaaattgatgtattcaagcattcagagttgacaacataatctgctatttttatagaggacattttggcagtaggtgtagggtgtttatatatgtgacaaaaccaagcttaatatccactcccctcaatcctcttacaaatacctcttctttacatctctatttcttttaatgacgttaaaagaaataccagtctttgtgttattcaagtttccaaagtttgaaatcttgaaattctctttttcttttcttgtgtccacttcaattaatagttgcctaagcccaatcaattctatagcagttcttacattctctctctcccccagctctcttcactgcacatacctggtttattactcctttctggatttccatttctccttcttctttgttatctcttacctgtcgaggctagttaatatgctgcctctagtttatagttcttaaagaaaagtagcatatgtctagtcatagatctgttcagaatacttagtttcctcattgctgtccagaaatgtctaaatgtctctaagatctatctttaatttacctttccagcttcatcttttgttcccttcttctaatccttatacagatttgatggtttaatcaaacagggttgtgatggttaactttacatgtcaacttgagtgggcaaagggatgcccagatagttggtgaacattatttctgggtgtgtctgtgagggtgtttccaaaagaggttagcacttgaatcagtagactgagtaaagaagatctgccctcaccaatatcggcgggcatcctccaatctggtgaggacctgaatagaacaaaaaggtgaaggaagggtgaattctcttcttgagctgggacatctatcttctcctatccttgggcatcagagctcctggttcttgggcctttggatttcaagatttataccactggatcccttacccccactttcattctcaggtcttcagcctcaaactgagagttacactatcaacttccctgtttctcaggcctttgaacttggactgaagggcatcaatttgcagatggcataatggtgggacttctcgaactctataatcatgtgaaccagtttccataagaaatttcatctatctatctatctatctatctatctatctatctatctatctatctatctaatttgttcatccatccatccattcatctgtccatccatccatccatccatccatccacccattcatctctctgtccattatatttgttctgtttctctggagaaccttgacaagtacagggtttaagagttgttgttcgtttcttttttttttttttttttcatagtgcctccagttttttttaacatttcctgtgctagtcttttttttttttttttttttttttttttttgagacagagtctctctctgtctcccaagctggagtgcagtggcacgatcttggctcactgcaagctccgcctcccagattcacaccattctcctgcctcagcctcccaagtagatgggactacaggtgcccaccaccacgcccagctaattttttgtatttttagtagagacgggatttcaccgtgttagccaggatgatctcgatctcctgacctcgtgatccgcccgcctctgcctcccaaagtgctgggagtataggtgcaagtcactgcgcctgaccttcctgtgctaatctttttgcttgggatgcacgagaatgctttagtgactcttctttgatcatttatctctccgccatcttttgcccatttctttacattcacccttaaaaaatttagtttcaactctgatgtatatgttgatacttctgaaatcagcaacaccatgtatgatttcgttacttgaaggacattactaaggttttatgggaccaataaatagcactcgtcctctatacctgaggtcggaaccagtagagggatacactagaagtaagacagatgaagaccaaaatgctgtcttcattaataatagagctgaaaccagaaaacgtggcttatagttgtggaaactggacttcctaatactgaatctcaaattatataggccactttgagacttaaggaaggtggggtagaagagaatgcaccccttgttaataattgccatccaaagataacgaggagaggaaatctcagtgctttccgtgtccagcttttgctcccaagttccccagtcaacctcacgtggggaggggtgagcgaggaggtggagtgagaccaaggtagtgacacttctggacatccctccacatggaggaaactttgggagtgagaagagcatttctcccataccttctgtggctatcttcccaaatatcccaccatcacctcaagtccactctcatcacattctcctcaaagctactttcttctccacttgctaggtttcgctagaactttgtgtcagttttgattcaccttccctcatgtgccatagagtcgaatattaaagtacaattacttttctttttcttttttttttttgagatggagtcttgctctgtcacccaggctagagtgcaatggcatggtctcagctcattgcaacttccaccccccaggttcaagtgattctcctgcctcagcctcccgagtagctggcactacaggtgcatgccaccacacctggctaatttttgtatttttagtagagacgaggtttcaccgtgttggttagggtgatctcgaactgctgacctcgtgatccacctgccttggcctcccaaagtgttgggattacaggcctgagccaccgcacctggccacaattacttttctttaaaatacttcttttacttgtcccttcttcaacagtgctgtcacaaacctatgatgaagcctaagcaccctaaataggtttgtcaaatctgtcagtgttttcctttgcttctagtttgctttctgaagaaggttgttcataaatctgttgtatcttagactagatagaaactggaatttaagtcttcctctattgctctaatacgtattatcctttttacaacattctccaacatgtaacagaactttagaaaagatgatggttttggaacacaccatgctcattcctatatgcacctttgcccagtggacctttttgcctgaaaagcaaacccttgactcttcatattcttcatcttctaactcaatttccacccagatggctctctgtgtactctagatcacacctctgagattgtacttaaaagtcagtatttaaaattaggaacttggttgttatcaaattgcttatgtttcttttaaaaaatctctttccaacttattttgaaggaattcttatacattttatgtctgtccaccctttcccaacatttctagtataggctaaacacataggaaataattagtaaattgtatgacttgatcaatagagaatcttaggatagtatgaattatttaatatgtttgaagttaaatatctaggggaagatacgagtcttaaaaaacaacaaacatttcttctatgtttcctaatttagaattttcttaaatgaacagatgtttacacatatcctatttaaaattcttctgatgcattccttgttggataataatacccttttcttcggtgaatcccaagtgagagtattggaatggaatactgacaggaaaaaaatgttctcaagataacacatggcctcaatcaagaaagcatcagaagaaatgaagcaggaatttggagaaaagacagatcgtcgtctaggctcattgattttaaaagaaaacatttgggtgcatgtaatatttaaagtcactttgtggaccttccttgttggaaatttgttgttattgttgttttggagacagggtttcactctgttgcccaggctggagtgcagtagcatgatcatggctcgctacagcctcaactgcaaatgtgtgccaccacatctggctaatttttttttttttgagacgaagtctcgctctctcgccaggctagagtgctgtggcgtgatctcggctcactgcaacctccaactccctggttcaagggattctcctgcctccgcctcccaagtagctgggattacaggcatgcactaccacacctggctattttttgtatttttagtagagatggggtttcactatgttggccaggatggtctcgatctcctgacctcttgatccgcccacctcggcctcccaaagtgctgggattgcaggcgtgagccaccatgcccggcctttttttttttaatttgtagagatgaggtcctgctatgatgccaggcttgtcttgagcttttgggctcaaagcaatcctcctgccttggccttccaaagttctgtgattacaagtgtgagtcaccacgctcagcctaaaatgctcttgatttataatgactcctatttgtctctgatatgtataaaaggaagtttccttaaagaaattcttttaaaaaaagatcttgtcttacctatatccacagaattgtttcctttaagtagatacagaacaacttgagaaaggttcatttcctaagctttattgttcttaaatttcagttattaaaaaattagctaagtattataaattagctaaccagttgagtcttccatttttacaaatattttggacagttaagaatgggggaaatctaggagaaattggaaatgtttcttaattcacaaggtttgagaattgtggagaggatgccgtttctaggaatggccacaagatggtgtagaaataaatgcattaaacatacataagtgtcattcattcaatcaataaacaaacgtttaataatctccaactacatgctaggaataatgttaggcataagagttattgaaatgatttatttatagttcctgtcctcaggaagcctagattctagtatagggagatgtacctgtaagaaaataaggacaatagtgcgttacagggactataatagaactatagatgaggaggaatggggacccaagggaagaagtgggcacttctatagagaaggggtgaggagtgtggatttgtaaagaaagcacagaggaaatgattcctaaacagaatcttataaacttggtaggtggttactaggaaggacattgtgtagattataggattgaaggttgtgtggcttggaaatacaggatggatctttcggaggaaaatatgtgagtgaaagaccaaaaattgacgaaacaatctggcatgtttaaggaactttaagtggtttaatttgattaaggtgcatggtagaggaggacactgaagataatgcaggccagataatgaaagcctgacatgctgtggtgatatgatagccttgttttagggatatcactttgatagtagtatggatggtggcagggaggcagggacatgagctgggagactattgtagcctccaggtgagagatgagggctggtactgtgagaatgagaggaggttaaatccacatgacttagtgactaaatggctgtctgaatgaggaagaggtagtatgctaagaaggcattaagggttctagcttaagggagtgtgatagatgattgaccaacattggaactgcaggaggaagattggctttaggaggaaaacattataatgagttcatagtggatatgtagtttcagggtttggctgaggactggtagtccagaggtgggagctggggtgaagaaagggaatgggagaaacactgttccagagagagagctcagtgtgggaggaatggagtagaatgggagggagggtggtatgatttaatttgggttatttaaatctttgtatttttttcttttgactgggtgttacagaattaagttgaggacatatatagtcagaccacaaaacagtttagtttattatttctaaacattaagctccaatgacacaatgcaatattagcatcctaatattctttctctcgatgtagaccttggaaagagaaattgcactgttaataggagtattttttgttgtttttgtgacaattaaatgcttggagctagggctatgtatttacagaaggactcacctctggccttgtgcagtttatgattcctggtgggtggcactgcctgctgggatcacctcgacagcagcactgctggcccagagctgtgttcttctgtaatctctcactgtccaccagtctgctcatactgaagtgttgccaacacttctgctctattgtctttgttcgttgtccacatctgctgaaacaactttcagttatgctaaattgcctgcctgggcagcctaatctatagctattgattatggtagtacactgacaacaggttgcataggtttttgagaggtaaatttatttctcttccctgcacctcctcaattggccctatatttttagagcacaattttgtagaatacagtctttttccccctgaatgtatatatcaagttatagcagaaatacctgtaatgatagtaactaatacgtatctagtatttactatatgccaggtattgtcctaagttcattacatgtattaacaatgctatgacttaagtactattctaggtgacaaaagtagaggtgcaggaaggttaagtgacttatccaaggtctcacatctggagagtgacagagccagtgttcagaatcaggcaggctcactccagagtccatgtctggatatggcttgatgtgatggggcagcgttacctggaatgtcctcccctttggatttgggctgcccacctttggtctttatgttcctgctgtcattttaatggtcttaggagaaacatgagaagagtgtcatataattccatttctgggacttaatttatgtttcatgagcagtggtgagtgaagtttagatgtgggtgcccgcccaggaggtgagtgaattcatgatctctggacttctgtttggcttgctcatttctatttggactccacatagaaatagattattaaatcttaggactttacatttttggactgtcatttagatgtttgattttcttttgactatgtctagtattctaagtgaaattacatccttagacaacttgtttttgttaagctaaatagtcctgaggatactttttaagcgtgaaagtacagcaatttattgcaaagcaaaagtacacgcttgaggaaggggaatgcaggcacattcaggagagggagtcgcacctcaagaatacttttaataaaataaattttatttaaaccaatagttcccaatgtcttacaactctttgcaggtaagctgtacttcttcctaatttatctgtgccctgaatgcttcttaaaaataattttttaaaagtgtattattggccgggtgtggtggctcacgcctgtaatcccagcactttgggagactgaggtgggcagaacacttgaggtcaggggttcgagaccagcctggccaatatggtgaaaccccatctctactaaaaatgcaaaaattagctgggcatggtgtgacacacctgtaatcccagctactcaggaggctgaggcaggagaatcgcttgaacccaggaggcagaggttgcagtgagccaagatcacgccactgcactccagcctgggtaacagagcgagactccgtctcaaaaaacaaaaaagtgtattattaaactattactcagatacttgctagaatggtaaggaaagactttattcaggagttggactagctgtcacaactgttgtaataggggagagaaattggggtcaactcttaatatagcaaagccagttgaagacgtatagccaatgagcagaattagggggtcagggttggaaaattactgaggagacatcaagggtcagggggttgttgccaaaacaacttaacaggaactttgcagaaggcagggcaaggtaatcaaatatcaaggatggagagtgaagaatttgatcagatatcaagagtgggggattctttctaaactgacttagcaagatttttgctaaaactgggctatgcaggtctggcaaagatggagtcaaagatgaggcttagttgagaagagagttcaggagagcctgattaaagtttgatcaagaagagagtctttttcagtaggaggagaaaaaaaagtttttaaaagaaacttttaaagacaattaacaatagccatgtggatgaaattcagttctctaagaaggctgaaatggagaaaactattctaagacttgttgagcattcactattttaaaagttaggcaatatcaagtcatcagtttatgtaaggttgtttaccttcagagtcaccataaacatattatgccaaatgtattctctcttttaatggccctagcaccaaggacaggtgttcatgaagatttcacaggcatattgaaaaactactgggaaatactcatctagtattttcttgtatatcatgtttaaatttacaagagcatacttgcccagaattccgcatcatggatattccaagcctttcacacattctacaaggctctagtcagggtttaaaaagaaataacatgttactatgctgcagtgattcacctcctgctgatgagtcacctcctactgattagaaacagagtaagagaatgttaccaatctgagttggttggacttgaagtatcataaaatatgcaggggtgggtctggatactaagggatccagtgctcctgaagttttaatgtgcatagtaatcaaatcattcaggatcttcttaacatgcaggttctgattcagtgggactgaagtaggacctcagattttgtatttctaatgagctcctgagtgatgctaattttgctggtcctaggaccatactttgagtagcaaggacttaactcaataggaagtagaactaagtgctcttttgagctctttatttacttttctccactaaaagtaagattgaatagttcctagtttcaaaacatatatatatgttcttgtcacattgtaaagaaagccaaaattttaaatttattacttccataccatggaaatgactgttgtttcatggaaatttagtgcattagttaaaggtgtcactgattcatcagttctagtatcctttgtaaagaggaagtttttttttgagtataaactcctagtaagtgacaatattactgacaataacataattgattataatattactgacaatatttttagtcacaaaaataaggttagtaaaaaatagaactattatatcttgagcacagactatgtgctaggcattcttcaaggtgctttttatacgttacctttataagcccttatatcaaccttgcaaggtagatattattaaatactttttgattgatgagtgagaaaaccatagttcagagagttaaggtatctgtagtgagagaagagaaatttgaacttgggtttccaaagttgtgtctaatctattagaaccaatttggttgttgcaatgcaaataatatcaaagtcctttattttcccaggaggattctgttcttcgcattcttagttcatgcattgactgaaacaaagggaaagttaggacttggcaaaatgattctgtctaggactattgctgtcacatctttgaggacaaagatcagtcagagactatttaactatcttattttctacctggaaagtttcccttttcttgactttctcttcacattgtaggtaggtaatccttttttcttttttccccttttgcccaggctatttgaccattcaacaactgttggatttgtttgaaaaatattcttagtagcttttattggttaatgtcctggggacatgggtctcctcccgtaaaacctttgtgaaacaagtctcaatgaaacaatgaaagcaaggtttcagaccaagttcttctgtacctacaaacatttattagcaagaaattcagaaggatgatagaacttgtttgtggggttacctcaatctttatcctttggcactctgcactcttcctagaactttccatgaaaacctcgctcggaggcagacacaagaaaaggttacatcaaaaggagattaaactgcccttagggtgtagattaaaaccagtgtatataaccaaccacagcatcccccctaatgatgctgaggtctttgggagtaaatgatgaataatatgtctagcacaggtttaaacggtcacttggcccttcctgggcaaagcaaaagagagaacttagccttttccttagttgcactttctcaattaattgtattttacataagataattatgattgttgcaatatttacattagaatactatgtcttttaaattcctgctattcttacgtggttccaaaacctccttctggatttgggaagagtgagaggagctgagcccagttaggtgtatgttttactgatctacctggtctctgctgctgcctcctgtgtccaggaaggctccagccctcagggaggagagctgtcctgtatctaagcttttacccctccattatctctttatttgttgccagcttatatggctagaagccagataatttagttctgcttcctgaattctctttaataaagcttctgttcaggagcaagtctgtgtgcagcaggcatgggggcacctgccttgtcacttagctgtgaccagcttacccaagccacagcttctgtctagggccccctctcatgtggctgattgcaggttagattgttaaagagggttagcacatagagatttgtttcctgaattgataacctttattacctggaaaacgataatagaaagatgatgtttgagttgtttactaaacttgtcttggtttccatgatgtttgttggctttctaactcatgtgaacacactagctgatcactgctctgccagcaatacagtgaccattctctactaaataaggggtgttgttgcgtcaattggatggtatgtaccagcaaatctgatagctctagtgaaaggaggattcataccattgtgtcattattagagtgttctgtaactgagaataaaacatttatttgattaagtgccatttactgtgcttccttttctagtcagtttctcatccacacagtctttggagccagatttaccatttaatgggacctaagtttttattggaagttttaaaaaaaattctttttttttcttttttgagacggagtcttgctctgtcgcccaggctggagtgcagtggtgtgatcttggctcactgcaacctccgcctcccgggttcaagcgattcttctgcctcagccgcctgagtagatgggattacaggtgcgcgccaccatgccaggctaatttttgtatttttagtgaagacggggtttcaccatgttggtcaggctggtctcgaactcctgacctcatgatccgccggcctttgaacactagaaaaaaactgagaagattgtttagtgcaacccacccagctactaactgggaaagacacttgaaccctctaggctttaaattaaatatctggaaaaatgaagcagttggaaaaaataattactaatatttttgggtctaaacttgtatcaccgtcttattttacaaaataaagaaatatttgcaaaattggaggcttgcttagttagtgggtttaatgagtaccagtggaatatattaaaagttaacattttaaagtggaaagattttaatattacttttttttttggttgtaagtcttgcttttcagggttgggtgactggggctattgtaatttggggcccttagccataggagctgccaaagggtacaaaagaattgcttcactgttaattttgctggacttttctaagggtaaacaaacttcctttgacatgtacaagtttccaaagctgtgctttcctcagggaaggtagttaaagctaaaagaagcaaagcttttagatttaattcagtgggtgaacatgaaagccatgcataaatcttagaagaactatgctttgctgagaggcaaagaattgtctctacactctgatgcggggatatgcaggaggagcccaggaggtccctgtgagggtgcaaaccaattaagtaagtcttgaaccgaaattgctttttatcatctgggtgagaagccacagatttaaagaaaagggctattgttttacaaagacctaattagctgggctacactcaagctcttgggtttttatcttattagagaaaggaaaggttgaaattgcttatgggctacttcctgggttggaattcctaggaatttaggatttctgaatccttttctaaggaatacagaattcttcctgaagccatgtgtatcggactaactatattttccgttgagactcaaactaaaaatgcaattgctctgatctactagaagtttgtcctaaatatcttccttactacaggcgtgctagtataagtatgctttagccttcttgagtacacagactttggagtaaataacatgtgggtttaaaactcagctgtgtaaaatctcagctgtacaccaagtggctctttgctttgaagcaagttacttgagcttatatataaaatagggtatctacaggagtattgagagtattaaataaaatttagtgacatagttagtgtctcaagggacctgaaagggcttctaactcttacatggtgtaatgttttaaaatgtggcactttcagtgtgacaatgttttataataaatatgaattgcactaattcttctttgttgaaaacaaacaggcaagcaacaaaaatgtggctacatagagacagagagagagagagagagagagagagagaaactctcacagtttatgcgagagtcacagttatgtgggaaaacttaactaagaagacttttccttattctttaggagcatcaaaaaatggcaccgagtccaaaccttggctcatggattgaaatctataatgtgccatactgactgagtgcctggggcaagttcttcaacttctctgcctcagtttcctcttctacaaattgtgaagatagtagtacctctagggtggttgtgaaaatgaaagggaaataaaggatgttaaagaaagtatccagcatgtactgagagcccagtaaaagttagtgatcaccattacctccactactgtattaaattgctgagcattcaattttaaaaataggaaggaagagctttagtgcagtagtgtttgacagatttaggatacaatatctttccttaaagtaaatttatttcattattttttagcatctaattattgccctttgatttgataaagagatatagatggtttgtcccacgagaacagttctaagctacactttttgacatgttaatcttctgtgtgaaggctggacttcattatttctagagtgttcctgaacaaggcagatcagagctttaatttttggaatgttaacaagggcagctgtataccagagttctagttgtttttatgagatttttaaagaagcacagaaaggaaactagtgaaaaaaaagtttatagactctggtttgaatccaaatcctttcagaagtgttctcttcatattagatggcaataaaattagtcatttaaatactcaaatgtgtgcttttataatttataattgtattcttagattttttttgcaattatttcgtatctttgatttggaaaacatttttaaggcatgagataaatgttttttgtataaatgaaaaaaattaagctgggtgtgcatgcacctgtattctcggctacttgagaggatgaggcgagatggagtgcaggagtttgagtccagcctgggtaacatagcaagactctctctcttaaaaaaaaaatgaaatgaaagccatttattctagaggattcaggaaactccagagtttgaattttcctataaatgcagtctttatccataaaatatgttgtgcacccttagtgatgaagtaaagtatttgaaatctattaaatgctttgccattttataatttattctaagctatgcttatgtttctgtgtagaacaaaggattaggaaactaacttatttctttcccccaagcatgctgtatttttttctttgaaaaaatgatttctaagatattttaatttaagttatagtcagtgtgactatagtcagtgtgatatttaattttaagttatagtcggtgtgattataaatatgaaaatctgaagagtcaatagagaaaaagactaggagaaatagtggctatgtatgggtagtagagatgttggtaatttatttatctttcaaacattcttattaaaaaattttaataattatgtattactcctaaatttagaagtcagtttctaattcgatgtaagatgcaataaattcaaagattagatttcagcattatttaaaaaattacaaaatattggtttttggaaattcttacataattttgtagaaaacatctaactttagagtatcttttttttttttttttttttttttttgagacggagtctcgctctgtcacccaggctggagtgcagtggcgcgatctcggctcactgcaagctccgcctcccgggttcacgccattctcctgcctcagcctccctagtagccgggactgcaggcgccagccaccacgcccggctaattttttgtatttttagtagagacggggttgcaccgtgttagccaggatagtctcgatctcctgacctcgtgatcctcccgcctcggcctcccaaagtgctgggattacaggcgtgagccaccgcgcccggcctagagtgtctttattattatttttttgatgtagtgatgactaaccagtcaattccattttgtgtattgtgaggacaataatgaaatgtttgtgaactaaagaaggtaaaaaattagaagataaaatactattattcaaagaattactaagagataaaagatgatacagtcaggaatttctgagaggcttacatttgggtgggaatacatgcaaccaaaaaattgtctaaatgtagaggtcacagaaagaataaagagattaggtagggtgttatagagaagagccaaaaattttttgtagaaggaagaaaacagttcaaaataacacggaaagaccaaaataagggttctggttaatgcatgaataaaatttattcatttagcattcaaaaaagagtttgttccattgattctcagtgccatctcttatcactatgacattatgacattttggaaaagactagtaacattttcactaaatggtaaggatttttatttttattttttgagacggagtctcgctctgttgcccaggctggagtgcaatggcatgatctcagctctatgcaatctccgcctcccaagttcaagcgattcttctgcctcagcttcccgagtagctgggattacaggcgtctgccaacatgcccagctaatttttgtatgtttagtagagatggggtttcatcatgctgaccaggctggtctcgaactaccgacctcaggcgatatgcccaccccggcctcccaaagtgctgggattacaggcgtcagccccggcgcccggccggtaaggatttttaaagtattttaaaaaaacgtttacttggtcaaaggtgattcattagctcatactatgttttgatataatataaaagcaacgaagtgctatgatgatggcactttgagtggctgttaagagtagaaaccagccgggcgcggtggctcaagcctgtaatactagcactttgggaggccgaggcgggcggatcacgaggtcaggagattgagaccatcctggctaacacgttgaaaccccgtctctactaaaaatacaaaaaattagctgggcgtggtggtgggcgcctgtagctccagctacttgggaggctgaggcaggagaatggcgtgaacccaggaggcggagcttgcagtgagccgagatcgcgccactgcattccagcctgggcgacagagcgagactccatctcaaaaaaaaaaaaaaaaaaaaaaaaaaaaaaaaaaaaaaaggagtagaaaccagagattcattggtcttagaaatagcattagtgcaacatgtggattatgtgtactctcatctacccaatggtatgagcacttcatctgctgtcaaagtaatggagaaaactctggtttagcattagaaatcaccatcttctctagtacaagtcatgaaacttaatgtcggcagttttaaaaactgcagtaaagaaattcaccttctcaccttttattttatcacataactttttgaaagctctgttattataattacagtgaattttggtttatataataccaacctcacaaatgcagaaattctcaatgataatgtttatggttttaaaatgtttattcaggttttaaagacttcttcttttaaaaagatttctgagtatatgaaaagtattactatgccatataaaaaaagatttattttaataatctcactctacttactgccagttttatccagaaaaatagatgaataaactgcttacaaaacagttagggaaaacaacatgtggtgtggaggtatggaggtagggaacatggtgagtcacatgaatgaaattttgctgcagttagaatttataaaagatgtgctgatagaaattactgtatctaatctaattatataaccattagaaaaatgtaaatattcttatatacctgagatttatctccagccatatatacttgaaaattaaagatggataaatttcatacatttctgtgcagctttataaagatctatttttggtaaggatggtctactaggttttttatgtatttattccaaaaattcattgctctaagttttaaagaaattaagtcctctgtttttttctgtagcaatgtgagtttcaatttttaaacaatgttttgtgtgaaataaagatttgttacacacacacacacacagccttacttcaccactttggtggctcactgtgctacatgtatgcagcattctgttttaataagagtcagcactactgtttttcttaaacacacagcagctatagctatcttttcggctgaggtgcagcatacagtgcagcaaaggaaaatatcttttggagtacagaatactcttaattatcagttactgggcatctactttgtgactgtaatttatgtcctcctatctcctgcaaatcctagacaagaaaaaaatccttaaatcaacatgatacaatgggtgctgcttatcaactgctaggtaagaacatcaaaatctggatcacagtagaggttatagtgaggccaagaccttagtcaacatatgggaaggaaccacttatgtgagagtatataatgacaataaagtgagtgagtgactaaacccacactatgtaataaaaataacatgaagttgagcactcttcaggtaccttaaacatagttatattttcataacaaactaaaagacagcattgttcctttttattctttcattgtgagacttggttattgcagaaaaatgataaaacattaacaaaccacaaataagcaaaatgaagataatacagtttactaatcatgtaactacccagaaatgaaaagttaattaatcaatgttaacattggtataaactttttgtatgttttttctcgtgttatttttttttaaaggtagtattttgcaatgctactgatgtgaattttaaattttttcttagaagtgatttatgactgaagaaaaactctgtgttggtcctgctcggattctttttttccttttctctcataattccgcattgtctactgataatcttttgtggtgatgtattagtcttactctgtgtccgactagttatttccttgtatcaaatcttttaatataaattacagataaatctaagtttccaaaattacttcacatttacttttcatgtaatcaaaaattatttgtatttctataggtctatttcctagactcatgcagtgctctgtttctagtttcttcttgaatacactttaaaagttattatgtattgtctgtaaggcaattctttctgctttcataattacctttttttttgaggtcttacatttttttttccttgaactctacctgcctatgttttatctgcattgaaagtattttcttatcttccctaaacacttgtttttctaccttgtgctcttattttataaaggctattgctttttaaacttttaaaagaattatattaagatgtttgatcagatttttgtctgttctctggtagcatttttctggtgaatactcttcacttgtcatttatgccttatgttttttcctcctattcttttagtattatgatttttgtataggttttgttttttttaaattgagatataatacacatataataaaattcaccactttaaagtgtataattcagtggtttttactgtattcacagagttgtacaaccaccattactatctattatgattttcatcatgctaaaaagaaactctgttagcagtaactcccctttcccccctactccctcatccctggcaatcattaatatactctttgcttctatggatttgcttattctgagcattttatagaaatcgaatcatacaatacatggccttttaagtctgttttttttttttcatttggcataatgttttctagatttatccatgttgtcatgtattattatttcatttctttttgtggctgaataatattccactgaatatagcacattttgtttattcatttattagttgacagatatttggattgttcccactttttgactattatgaagaatgttactataaatatttgtgtacaaattttcatgtggacataacattttcatttctcttggatgtatacctatgagtgtaattgctgggtcatgtagtaactctatgttttaccatttgaagaactgctagactgttttccaaagaggctataccattttacatttccatcagcataatatgagggctctaatttctccatatcctcgctaacatttgttattatctgacattttgattttatccaccctctctgtgtgaagtgatatatcattatgtttttgatttgcatttctttaatgacaaatgatgttgagcattttttcatgtgcttgtcaggtcatttttatgtattatttggataaatgtttgtcttagtctgtattgcaatgctataacagactaccacacactgggtatttataatgaacagaaatttatttggcacatagttccagagactaggaagtctaagagcatagtgtcagcatctggtggggccttcaaacttcatcaccttatggtggaaggtggaagggcaagagagtacatgagagagagcaagagacagacagagagcaaatgagccaaactcagttttataacaacccactctcacaataatgaattcactccagtgataaaaacattaatctgctcctgagggcagagccctcatggcctaatcacctcttaatggtctcacttctgaataccatcattatagcaattaaatttcaatgtaagctttggaggagatattcaaaccatagcaatgtctattcaaatttgttcctcatttgtttaaatttatttattttactgttattttaactctatatttgtttcatttaaaaaattagggtataattgacaaaatgaaaatgagatatatttacagtgtataatgtgatgttttgatatgtatatatacattgtaaatggttaaatcaagctaattaacatatccaatattgcccatttttaagttaaactatttgtatttttattatagaattatgagtttttatatattatggatactaaatctttatcagaaatatgatttacaaatattttatcccattctaagagttgtcttttcagtttcttttatttattctttttttttgagacagggtctcactctgtcacctaggctggagtgcagtggcaagatcatagctcactgcagtctccaatttctgggttcaagcaaccctcccgcttagttccctgggcagctggaactacaggtgtgtgccaccatgcccagctaatttaaaattttttattatttttgtagagacaaggtctcactgtgttgcccagaatggtctcaaactcctggccctaagtgatcttcctgccttggcctcccaaattgctgggattacaggcatgagccaccacacttgggctcaatttctttctttctttctttcttttttgacaggatctcactctgtcacccaaggtggagtgcagtggcatggtcttggctcactgcaacctccaccacctgggctcaagtgatcctcccacctcagccccgcaagttgctgggactacaagtgcatgccaccacacctggctaatatttgaggggaatttttagtagagatgggtttttgccatgttgcccaggctggtcttgaactcctgagctcaagtgatccacctgccttggtctcccaaagtattgggattacaggcttaagccaccacacctagctctcaatttcttaatagtatcttttgacatacaaatttttaatattaacaaagcccaatgtatttatttttcttttgttgcttgtgcttatgattattatgattattattttattatttgagacagattctcagtctatcacacaggcaagagggcagtggtgtgatctctgctcactgcaatttctgccgccttagttgaagtgattctcatgcctcagcctcctaagtagctgggactacagtcatgtgccaccatgcctggctaatttttgtatttttagtagagacagggtttcaacatgtttgcgagctcatcttgaactcctggactgaagtgatccacccaccttggcctcccgaagtgctgggattacagccactgtacctggcatattattattttgtttgtttttgtttgtttgtttgttttcttgagacagagtcttgctctgtcacccaggctggagtgcagtggcgagttctgggttcactgcaacctccacctcctgggttcaaatgattctcctgcctcagcttccctagtagctgggactacaggtgcccgccaccacacccggctaatttttgtatttagagatggggcttcactatgttagccagactggtcttgaactcctgacctcaagtgatcagcctacttcggcctcccaaagtgctgggattacaggcatgagccacctcacctggccatattattttttaataataaaaaattattctgcagtcatctacaatgcttgcacctttggtgtcatatctaagaaacccttgcctagttcaggccatgaagttatacctacgtttttgtttaagagttttatagtgttagtcattacatttaggtctttgattcattttccactttaagttaattttccatatggtatgagggagggatccaaattcacttttttgcatgtggatattcagttgtcccaacactattccttggaaagattgtatttacccagtgaatgctcttgaaattttttattgaaaatcaagtgaccatagacacatgagtttatttctggacactattccacttatctacatgtttatccatgcctgtagtatcacactgtcctgtagtaagtttgaaatcaggaagtgtggttctccaaccttgttctttgttcttctttttcaagattattttagctattctaggtcccttacaattctatgtaaattttaaggatcagcttgtccatttcagcaaaagaggcactggaattttgatagtgtactgaatttgtagatcactttgggtagtattgccaatacaatatgaagtcttccaatacataaacatggactatctttccatttatttaggtcctcattgatttctttcaacagtattgtgcagttttcagtgtacttctttaaaatttattcctaatttaaatatttaataaaataatcaaataaaaatatttgattgcgtttgatgctatcacaaatggaatagttttattaatttccattttgggttgtttactgcaaagtgtttaagaataggactgatatttgtatattgatcttatatactgcaaacttgctcaatttattagcttttagtttttttttttttgtgagatggagtcttgctctgttgctcaagctggagtgcagtggcaccatctcgtctcactgcaatctccgtctcctgggttcaagcaattctcctgcctcagcctcccaagaggctgggactataggcgcacgccgctatgcccagataattttttgtattttagtagagatggggtttcaccatgttgcccaggctggtcgtgaacttccttagctcaggcaatccgcctgccttggcctcccaaagtgctgagattacaggcatgagccaccacgcctggccttagtttttattttttaaagttggattctttagagttttctctgtaaaaaattgtgttatttgcaaataaagatagatttctttcttcttttccaatctgaatgccttttatttctttctcttgccaaattgccattgctagagcctccagtacaaagtttaaaagtagtggtgagagcagaccttcttttctcttttttgaaaacgttcaggctttcaccattaagtatgatgttagttgtgggttttccatagatgctctttatcaagttcaggaatttccttgctattcctagcttattgaatgtttttactaagaaagggtgttagattttgttaaatatctttctgtatctgttgagatgattatgtagtttttgtttttattctgttgatatggcatattacattaattgatttctgtatataaactgaccttgtattcctgagatagactccactcggttgtgatatagaatcctttatatgtactactggatttggtttgctagtattttattgagggtttttgcatctgtattttttttttttttttcgagacagaggtctcattctattacccagcctggagtgcagaggtgcaattgtagctcactgtagccttgacctcccgggctcaagggatcctcctgccttagcttccttagtaactgggaccacaggtggacaccaccatgccccggctaatttttaaatttcttttgtagagactgggtcttgctacgttgcctaggctggtctcaatctcctgggctcaagcgatcctcctgccttggcttcctaaagtgcttagagtataggtgtcagccaccgtgtccagtcttgcatctgtattttttttttttttgagacagagttttgctcttgttgcccaggctggagtgcaatggcatgatctcggctcaccacagcctctgcctcctgggttcaagcgattctcccgcctcagcctcccgagtagctgtgattacaggcatgcgccatcacgcctggctaattttgtatttttaatagagacgaggtttctccatgttggtcaggctggtctcgaacccccaacctcaggtgatccacccaccttggcctcccaaagtgctgggattacaggcatgagccaccacacctggtgcatctgtattcttaagggatattcttctttagttttattttcttgtaattctttgttatgctttcagtatcggtgatacagacatcacagagtgagtttgggagtgttccctcctcttctattttttgggagagtttctcaagaattggtgttttatcttatttaagcatttggcagaatttaccagtgaagccatctggtcatgggcttttctttctgtgaaaaaaattttttttttaattactgaatcaacttctttagttgttatgcatgtattcagattttctatttcttcttttattattttggttgattgtatctttctaggaatttttctatttaatctgagttatctcatttgttggaatgcagttgttcatagtgtttacttataatccatttttatgccttgtgagattggtagtaatatttagtctttcatttccaatttgagtaatttgaattttctctcttttttcttgattgatctaaaataaaattttgttaatttgttgactttttcaaataatcaacttttggttttgttgatttaagaaaattctctatttagtttatttctgccctaatatttattatttccttccttctgcttgctttgggcttaggtcgctctcctttttctatttttataagttgaaatgttaggttattgacctaagatctttttttgtttataaaataggcatttaccattataggtgtcccctgctttcactgcatttcttaagttttagtatgtcgtattttcattttatctcaaaatattatgtaatgtcccttatgacttattctttgacccattggttattagaagtattttgtttaatttccacttatttttaattttccaaatttccttctgttatgggtttctttttctttcttttttttttttttgagatggagtcccgctctgttgcccaggctggagtgcagtggcgtgatcttggctcactgcaagctccgcctcccgggttcacaccattctcctgcctcagcctcccgagtagctgggactacaggcacccgccaccacgcttggctatttttttttttttttgtatttttggtagagacggggtttcaccgtgttagccaggatggtcttgatctcgacctcgtgatccgcctgcctcagcctcccaaagtgctgggattacaggcgtgagccaccatgcccggcccctgttattggtttctaaagttattccactttggtgagagaatatactgtgtatgatttcattccttttaaatttattaaagcttgctttgtggaataatatgtgattgatcctggagaatgttccatgtgtgaaagtgatttaataaataaacatttgagaaagtttccagctttaattttgaagatggtaaatattgatagatacaattcacacacacaaaagctcttggggttctctttttttttttttttttttgagtcagagtctcgcactgtctcccaagctggagttcaatggcgccatctcggctcactgcaacctccgcctcctgggttcaagcgattctcctgcctcagcctcctgagtagctgggattacaggcgcctgccaccatgcctggctaattttttgtatttttagtagagacggggtttcaccatgttggtcaggctggtgtcgaactcatgacctcaggtaatccgatcgcctcagcctcccaaagtgctgggattacaggcgtgagccactgcaactggcccacacttttaaaaattattaagccaaggcgggcagattacgtgaggtcaggtgtttgagaccagcctgaccaacatggtgaaaccccatctccactgaaaatacaaaaaattagctgggtgtgctggcaggcgcctgtaatcccagctacttgggaggctgaggcaggagaatcgcttgaatgtggaaggcggaggttgcagtgagccaagatcgcaccactgcactccagctgggtgcgacagaggaagacgccatctcaaaaaaaaaaaaaaaaaaaaaaagtgtgaatagctcctaacaccaaaatgtttgataaccactgacctaaaggaatggtgggaaatgactctggataaaaattcaactcagaaatgtttgcttggtgaatgaatatgaattttcttctgtaatcagtgggaaatcaatggaggtttttagaaggaattagtaattatatcgattgcatccccggggcgtagagcaattccttgtacttagtagctcagcaaatatttgtcggatggtagtcagaagtatggactgagaaactgagagactagctgtggaaacacttgtttgtttttagaattctaggcaaaaatgcttagatgaatgaaggccattctgagaaattatgtaccaattccctaattacttttttttttttttttgagactgagtctggctctgttgcccaggcgatcttggctcactgtaacctccgcctcctgggttcaagtgattgttgtgcctcagcctcctcagtagctgggattacaggtgggcgccaccatgcccaaggtttttgtagttttagtagagatgggttttgccatgttggccaggatggtctcaaactcctgacttcaagtggtccacccatctgggcctcccaaaatgttggcttataggcttgcaccactgcgctccgcctaattatgttttttgggacagggtcttgctctgtcacccaggctggagtgcagtggtgccatcatagctcactgcacccttgaactcctggttcaagtgatcctcctggcttagcctcttgagttgcttggactacaggcatgtgccaccatgacaggctaattacatttatttatttatttatttatttatttatttgtagagatgagaatcttactattttgtgcaggcagatcttgaactcctaccctcaagtgatcttcccacctcagcctcccaaagtgttgggattacaagtgtgagccaccacgcacagccccttattacctttaatttctgccgtaatcattacagcaaatgtgaaatatttcctggatatttctgtggatatttctggatatttgtgtgtgtgtggttttttgtttgtttgtttgttttaggagacagggtctcactcttccctcaggctggagtgcagtggtgtgctcatagctcactgcagcagcctcaaactcctgggctcaagcaatcttcccacttcagcctcccaagtagctgagaccagatgagcggatcaccctccctggctaatttttcttttttcttttttttttttttttagagacaaagtctcgccatgttttccaggctggtcttgaactcctggcctcaagtgattctcctaccttggcttcccaaactgctgggattatagatgtgagccaccacgtgtggtatatttcggattttttttttcaatagaacattcaatgtcttaccaacaatttaatgtgggttttgaatgaatataatcaatccgttttcaatgcttttattcagataagtttgtagtttgaacaaatagaaagtcaaacatatattctgagtacaaaacagcttcaagggattcactgcagcgataatcacagtatctcttctttaaaataggaaatcctgcttgggatttctacgtactttaaaatgttaatttaaatcaatgtaactttgcatatactgtgggaatattttgaggttacacagtggattccagcagaaagcagctggcacactcaaaataggataaattagggtgtttttatttatgtaggaagtatttacagaggtaaataaagagggtaggaaactgcggggatggaaaaagcaaaaaaaaagaagtatgtgtggaatgtagggcacaggtataggctctaactttgagataggatataccccttcctctgaccctacaggaaagtgttaaaaaacagatgtagagatggatatattgccatcaaaaggtgatggtaaggcatttgctgcttgtctgagactaggctagagctctttccctgattcttactgtttgcccaaggcctgttacctggtaagggagcgaatttatcctcatcttgcagccaaagaagaagtaatttttatcattgcaaggaaatattacacccaatccatgtgtcaggtctactattctaatattcattttcctgtgcacatcagataccacaaagtctaggttccaggatcactgaggtacccctgtctccattagtagagataatttgttgcactgatagataaaaagtacagtgtagctgtactgaaaatgacatggaactgctttctcaacccataatttttttctacccaacaatctcctctcccttcctctgagcagatgactttctcccccttaattgagataaataagaccttcagaacaaaactctattcctttctccccatcttcacctttccccctttagtttcagggattaggtgttcacctgggctctgcagttctcatttcattctttgtcgttgctattttactttatcatctatttcctctcccttctgtattttcaacctctttcccccattgcctcctattgctaagcctgtaagacgttttcatcctaaaatgtcaacaacaaccagaatgcccaccacaataattaaaggagaatgttctgctgtctgcacatcagttctattgcctactgcctttctctctctctcatgctctctctctttttgagatagcatcttacctgtcatccagcctagagtgctgtggtatgattatagctcactgcagcctcaaactgcagggctcaagtgatcctcacatctcagcctctcaaagtgctgggattacaggcatgagacacagcacctggccccttatctctcttttcttgctcagtcaagcttctttaaagtatgagctacaaaggataggatacagaattttcagagcccaggacaaatgaaaatgaatggttacttgttcaaaattattaagaatttcaagatggcaacctcagagtattaaacaactcatggggactggggccctatgtgactgcataggttgcccatcacaaagctgactcagaatctacacttctcttttttacttactgaactcccattccctcctcacccactgcaatttaccttttacctccatcttaatgctggaggtaaaacctccaccttggattctccacctagctaaaatcgttaaatatttttcagttcttatatttatctttttgcattaacctaatcttcccatatatttctatctcccatccataatcatggttgttaaaaaattacttgttgaatgaatgaatgaccaatctttgactcctgtttgttggattctcagggtcctgactatcttatcattttatgccatacatctaccctagttagtccctccaggtttacatgtaagcttgtgagtttgaaacctatatgtaaattgatgacttcaaactctctatctctagcttttcccctaactttagactcatctatctatctatctatctatctatctccttttgcctctgagaaatcttcatccggctgtccaattgatacctcaatctcagcatgttcaaaaccaaactcattaccatctcctacttgaagctttctctttctgttgtggttcttttatttgtttatttatttaatttattttttcatttttctttgagatggagttttgctcttgttgcccaggcctgagtgcagtggtgcaatctcagctcactgccacctccgcctcccaggttcaagcgattctcctgcctcagcctcccgagtagctgggattacaggcatgcgccaccacgcccagttaatttttgtatttttagtagaagggagtttcaccatgttgaccagactggtctcaaactcctgacctcaggtgatccacctgccttggcctcccaaagtgttgggattacaggcgtgagccactgtgcccagccctgactcttattaattttttgttttttagacggagtctcgctctgtcgcctaggctggagtgcagtggcgcgatctaggctcactacaagctccgcctctcgtgttcacgccattttcctgcctcagcctgtccgagtagctgggactacaggctcccgccaccacgcccggctaatttttttgtatttttagtagagacggggtttcaccgtggtctcgatctcctgacctcgtgatctgcccgcctcagcctcccaaaatgctgggattacaagcgtgagccactgcgcccggcccctgattcttatttttaatggtatatctaggcacaaaatgctaggaaggactcattgagggaggaatttatattttctaaccaatgtaaggagctcaggaaaaatatcaaatttgaaattgaacttcaaagttgaataaacttggaaagataaaaatgagatggaagttgcatgtaagatgaacaaaacaaaacaaaacaaaacaaaaaacaaaaaactagggatgggttggagtaaaaggattcccagctcttggtacattattctcatgtgagtccccccaccaacattgagtggggatcacttgtgaacctacaggatattgctgaaataatgaagtttgacttctgaggttcagtcataaatgatattgtggcttctatcctgttctcttggaccactagctctggagccagctgccgtggtgtatgacctgcacacagctctatggagaagtctatgtgttgaggaactgaggcttctagaaaacagcccatgtgagtggcccattttagatgcagatcatctatcccaggcaagccttcagatacttgtagtcttggcctatgtgttgattcctgacccaatacagaaccacccagccaagccactcctgaatccctcatccacagaaaccgtgaaataataaatgtttgggtttctaagccattatgttttgggataatttattatatagtaatagataactaatgcagagggtttttcgttagatacatttttatatgtattgagttttggaaccgtatatctatagtttgaacagtataactaaaagcaaccacaaagggaactctgaaaataaaatcctttcctaaattctgcattgatttcccattacagtcttatttagaattaaataagaatactttgcacttatctacccagtgtctatgtgatctggcccctgcttccttcttctgtgtctccagccaggagacattaatgttggtttcccttgacttccatcaatggtctgacatttctgaattccaggaatgacaaagattatgtactcgaagcaaaactctagctgcacaccataaagcagctcttcagcaaaagtgatatggcctttatgtttttaacccagtaggacacagacactcacacacacacacactctctctctctcacacacacacacacacatatactctcttacagctttatagaggtaaaaagtaaacagtatatatttaacatatgtactttgacaaatttaaaatgaaatttgaaaccatcaatatgctcaaaggaatgaacacatcttttatgcttaaaagtttcctccaagcccttttgtaatctctccttccccctcacctcatcccaaactagttatctagacagattatagaatatttccatcgttacagaaaatttattggaaagggcttatgtaattcttgtaaagaatacctcattttgtttgattgtagctaatataccagttgttacaaagtcaatgagtattggaactagtagtacctgcgaacacttctatctattgacagttactgatgacataacttttgagttttagagctctttctgctggatcagctgaggtatgtcaagttcataccattgtgcagagtgtgaaatgccaatagtaaagcatcctcttcctctaggaaactaattagagaagttagctccagagattaaaagaaagattcatagtctttgattgaggtagaggaaaaacaaaaaaacccaaacttgctccttccatttaattagcagatggaagtgtgtccagaaattcttctgtgtcctctgatccttttttccttttcttcttttctctgtttgattatttagaccaggggttggtaacttccttataaatccctcagagatgaatggaattaggaaaggtctcgtctggtctctttcaccttcacttggagtcctagagtgagaggaaaatgggataatagagtctcttcctagacaatccctcaattgcttgtttcttgttacagaagtttattgttaaaattacatgtacagataagctaaaagaagaaagtaaaaatgatgactatgcttcttacatagaaataactgcttaatattgtagtctaaactgaattctcactctcttttataaaaatgaaaatatactacacattttagtacttatgttactataaaataaacatatattatcaagtatcttctatagaacaatttaaaataactagtgggctgggtgtggtggctcatgcctgtaattccagcactttgggatgccaaggcgggcagatcacttgagctcaggagttggagaccagcctgggcaacatggtaaaaccccgtctctaccaaaaatataaaaattagccaggcatggtggcatgtgcctgtggtcccagctacttgggaggcagactgggagatcgcttgagcccaggaggtggaggttgcagtgagctgagattgtgccactgcactcctgcctgggcaacagagagagaccctgtctcaaacaaacaaaaaactaatggaattgtatactgttgtttagctgtgtcagctgctagatattcaaagtcctttttttctagaagctttgatccttgatttttttttaaagacacatttattcagcatcatgatcagactattacatttagcaatcaacagcatgggtgcaataaaaaatgtacattaaaactctttgttggaatgctttacactttccacagaacagaagctaaaatacaattagtcacaaacacagttctcgagttttttgcccatacacacgagccactgcctcagtcagtgatgatttccatcacttcgattattcaaactgttcaaaataaacttttagttgatgttcttcagtgtcttctttaatgccaccaacaaatatctttttcacagttaagtgggcaccgggtttttgagaatattctcttgagaccgctctctttggttccacaactctcccatccaccttgtgtggctttgcattcacggctgccatctacctcctccacagtggcatacgtgacaaacccagagcccccggagtgcttggtgcttgcatgtctacttaccacacaatctgtgagccttctccactgctcagaagggctcctcaggctctcatcggttgtttcaaagctcagccctcccatgaagagcttccgcagctgttccggctctttaggacaggacggccctgggaagagagactttaacgaggcttcctcagcggtatccacgggcagaaagcagcccttgatttttttttaatagtcttgtatttaaggacaaatatagataagtaattcctagcaatgttagagtcaagattgccagtttacaaaaggaggaaaattaagtgcctctgaagttgctgaaatatttagctgggaggggtggcacaagccagatactcgggaggctaaggtgggaggattgcttgatctcagagtttcagttcagcccgggcaacatagagacatagtctcttaaaaaaaaatattactagtttaagatgcattttttttattttgaattctgaatgatgtttactaacttggaatggatggaaacctaatctgggggtgggaatgtgccagctgttcaatgattcagaaaaataagaatgttggttcaggatcagaatcaaaggatgccgtatttaattgaaactttgggaaaatttatgtaggcaaaatgaattatccaaattaaaattaagccaaaacgccaggtttaatgcattaataatagaattttttttttttaaaatgaagcaaaaaacctaggttctgttgattttgtcacttaccgtaggcagataatatttaatgtagttttaggaaccctgagaataggaagaatatttctggataaattccaaaaaaagaaacacaccagtgtcttgtacaaaggatgaaagcctttattagcttgtaacaaaatacattggagtgcacactatgtcaccaggctggactggcctatacctcctatcccctggagaagaaactgaatggctgcaatgtgctccgtgtggctactggacactttctggtttacttggttagtcttttttttttttttttttttttttttttttttttttttgagatggagtttcactcttttgcccaggctggagtgcagtggtgcgatcttggctcactgcaacctccgtctccctggttcaagcgattctcctgcctcagcctcctgagtagctgggattataggcacccaccactacacctgtctaatttttgtatttttagtagagatgaggttttgccatgttggccaggctggtctcgaacgcctgacctcaagtgatccacccacattggcctcccaaagtgctgggattacaggcatgagccaccgcacccggcctgcttgatcagtcttgttccaacctgcggagttgcatgtacagataggttatgatcatgtgtgctgcttttcatttgcatttatgattataattatgcaatttaattaaatattatatgagcagatgaaacatatttgaaaacaaaagttattctttctatgaaaaatggaatgtttagtaaaaacgataaaagtgaatcagggtgggccagaaaactgtaacgagattagaaagaaattcatcgaaatctttaaggaatctgtattcatactgcctacatttagcttgacatttcccttgacttttttcccctctccactttaaaaaagctaaaatttggaatagactatccattggagatgtgggttttgcaaggaagaggacttagaactccatattgcagtcatgcaatcagagaaaggctgttggcctttactcatgaatgaaatggtaaataaatacactttaaatcaaagtaaaatgtttacattataaatatatataaaaatatcattcattcatatatatatgtatatatatgtatatatatgtgtatatatatatataaaatgattctcaattctttttcacctgggcctgattgctctagataaggaatgtgagcttatactatgaatatttttaaatagagatttaaacaattaataaggcttcagccaaatttggtctcatagcacaaattcctctgagtgactatgaaaatatgacttagatcaatcaatacttttgataagtaattatgagaaacttgagattgtgataaaagattttcaaataagtgatagatgacaaaataaatttgtatctttaaaatttttctgtagttttgttatccccaaaatgaaacaaactggcctacattgatttaaattattctactttttggcctgtgggtaatagaatagatcaggagtttgattatttagagtaggcgacttttttggtaaagggctaggtaggaaatatttttggttttgtggatcttgtggttgttactcaactgtgctcttgtagctaaagcacccatagacaatatgcaaacaaatcagaatggttgtgttccaataaaacttttttatgggtgttaaaatttgaatttcatatcattttcatatgtcatgaaatattatcctcctttagtttttttttcagacattaaaaagtataaaatccattcttagctcatagtctgtcctctgtccaaaaatatgtggaaggctgcacttggcctgctgaccattgtttctctcccctgctctagcctcattctagctctccagcactgcctttctcacgaccctataatctagctgcttttagtgtcacagaaacacagtgtgttcacatttgcttacatatattttgcttatattttttcctgctgggaacactttctgttctgttttctaatccaaaaatcagcttaatgtttctgtctttcatgataattttcacagcttcactagccctcaggtgtgtccctcacctccaaattccctttagcacctttgatcttttttcatatgattagtgtgaattcgtcttttattatttcagatatgtgagctttgattcttcttttgattataacttattagaacagaagccatgtattatacttcctcttatttctctcagcatagcgctgggcacatagaagtattaacactagattgacatgtttgctatcaaaatacaatatatattattcttttattaagttttaaagcatttttatgtgggtttttggtctcaatacttgccctttttttctctgtcttcacttaatctttccccactgacttccttccctgtccgtaatcacgctcaactctttatttaaaaattaaataagcagggccgggcgtggtggttcacgcctgtaatcccagcactttgggaggctgaggcgggtggatcacgaggtcaggagttcgagaccagcctggccaacatgttgaaaccctgtctctactaaaaatataaaaattagctgggtgtggaggcacgcgcctgtaatcccagttactcgggaggctgaggcaggagaatcgcttgaacccgggaagccgaggttgcagtgagccgagatcatgccattgcactccatcctgggcaacagggcaagactccatcaaaaaaaaaaaaaaaattagccgggcatggtggctcacgcctgtaatcccagcactttgggaggcggaggtgggcagatcacgaggtcaggagattgacaccatcctggctaacatggtgaaaccccgtctctgctaaaaatacaaaaaaattagccgggcgtggtggcgggcacctgtagtcccagctactcggaaggctgtgggaggagaatggcgtgaacctgggagacagagcttgcagtgagcccagatcgcaccactgcactccagcctgggggacagagcaagactctgtctcaaaaaaaaaaaaaaaaaaaaaaaaaaaaattaaataagcagcgcaaccttccattgacattgatactcatctattccttaccaagtttttctctgagatggtattttttgaacatctaaaaggaagatatatacatgaggtaagcccttgcttctgtctgggaacagttttctgccctggcacatggaagtggagcctctgcagagctcagtctcactgggctggctgaggaggcagggattagagtttgagtatgctgaggcagctggaatttgcaaggcgggtctttagagaggatggcagtcacagaagtctgtctggggacttgctgctcaacatcatttgccaaaagctgatctgcacgtgtataggtcaagactccatgaggcctaggagaaattgccagcagcagggctgagggctgaatggtgatacagaggttttactgtgctgggagatgttcaagttctggctcagctagaatataaataccacattaggtaccttaagtgttctgttgagacaccaaaaaggccgcactccagagtaagctatgccctaagtctaagttcaagacaaatagactgggtgggtgtggtggctcactcctgtaatcccaggacttagggaggccgaggcgggcagatcacgaggtcaggagttcgagaccagcctgaccaacatggtgaaactcgtctctattaaaaatacaaaaatcagctcggtgtggtggcgcgcgcctgtaattccagctactcaggaagctgaggcaggagaatcgcttgaacctgggaagtggaagttgcagtgagccaagatagcgccactgcactccagcttgggcgacagagcgagactctgtctcaaaacaaacaaacaaacagacaaaaaacaaatagactttccctaaaaaagaatgtaaaattgatccggatggagccaaagtgatctaccaataatttaactgccttccagaaaaaaagctcaacacactttaaaggaagaccacatagtccagaatctctaccatgttcaccatatgataaaaaaaattactaatcatgtgaagaagtggaatgagacctacaatcacaaaaaaatgcagtcaatagaaacagaaactgagatgacctagatgttgccatcccacagaaacctgtaatgcgttctcccaattttttgctaatatttaacacattcgtcaagatcttattcaaatggtaggtttttttcaagaggcttccctgaattcctccaatatgaaataatttatttctcttttgacttctcactggtttatgtctctcctgtgatacctaattatattatagtcatctgcgtacttattttctttccttggctgaggccaaggatttgtattttctcatctttttagttactgatgtatttagccaccaaagtcatgtacagatggtccccaacttacaatgctttgacttacaatttttcaactttacaatgatgtgaaagctagacggattcagtagaaaactacttcaaattttaaattttgatgtttccccaactgtaggctaatgtaagtgttctgagttctgagcacgtttgagattggcaaggctaagctacgctgtttggtaggttaggtgtattaagtgcatttttgacttatggtactttcagtttatgatgtgtttatcagcacatagtttcattgtaacttgaggagcatctgtagtaagcactcaataattatttttgaatatatgaataaaagatatgtgtttcatatttccctgttgttttaaaaccatatacactcttcaatttttgtatttactcatgtgcagataggtatgagtgaaaaatccatcttaatgttagtttaaattatgagttttcatagaggtttccatgaattagcagactaaagagattggtcttctttcctgttgtacaaataaaaaaaaaagcagttggttattgtttttattccagaatattaaatataaatttatttgtgtctatcttcactagactgtaaggtccatgaggccagagacatggtttaatatccccagtattttccattcttgacacatagtaaatacttaataagtacttattaaatgtcttacattgactggtatttggccaagttttgataaatattttaccatttcatgataatttattttaagccattttgagtgtttcaagaaaagcctgcagagttttaaaataatttttctcagatatcatagctgtactataaggcctattaattatattttaacaaaagctagataggtagtgttttcctttacttgttaattttttaaagatggttttagctgttcattttattgctatttatatatatcatattgacagtatttataagctttctttgacaacaattcataagttaaaaaaagtcagtttgtggaggcttgtctagctatatagaaagtggaaatggttaatagaatgtttaatgtcatcatatttcaaagttagagattatctaatcactataccctatgaaaaatgacttctagaaagttaaagtgagctgttcacaaagtcagaacacgctcatattttgtataactactacaaccttttaaaaacaaaaatatatgaggaagatattttttgtattctgaaaataacaagggtttgcatattaagatataatcaatatgaaaacatctctacttctggcaagttttaacatggtaaagagcttgaaacagctctgaatttttttttttgaaaatttttaattttgatattttcttttgactctacatagagagagtcatgtccgttttataaccttccactctccccctgtctaccccaaaagaaacaacctagcaatgctcaaaatgacaaatccagcctttgtttcaccagattatttcaatctggcactggcactaccactagcttggtctgattatagttaatccactgcctacaacatgacaaatgtttttggtccaagttgaatggcgaagtcttttcaaacagggaaagcagttgtcagctgtccttgttgtggtaccaacatgtatcatgtcaggacagccaaacaaagaagaggatgattcagaatgctgacccgagtacacagaaccttgttaactctggtgggttttctgcaaggcttgttaatagtgatagaaaaaagaaatcatagcacaaaccccatattatattggttgccttagactgtatacacttatcaactaatatcaaatgcaattacaaaactgtgaattataatttctagtttctctataaatgacacatttctccttaaaaatctcaatttatttaagattttcttaaacatttctcctctagtttgttaagcttgtttagtagaaacaataccacttacagtacttgaattttatgagtgctatagctgttggggtcactcattcaaaaaaaaaaaaacaaaaccttaaattctcttggtgtgcttaccattcatcttttcttttatgggagatattgcccttttttctctttggggtgagtgatgcatgatgttgtttctgcaatgggcagaatactatagactattatatacacttatggatgtatgctctacatggcctatgctcatccttctgactacaagctagctcattaattctgcagagaggtatactccatagacaagaataaacattttctccactttattttagatgactcactttttttgatgcttttttaaaaatttagatttttctatttttttccttgttcttttttttttgactgggttcctaattattttcttaaaaaatgtgaattatttctactttacaaattaatgtgagaaatgaaagtaaaacatgatactttctttattagtaaagcatgtcatgatccaataggtttgtgttgtaatttctccttgaaaagaactgagtttatggtctttacttcacatcccagctgttcgagaattgctaaatccatagggagttgcgtgagttatgtaattggcatgaattatttgagtttgaggaaacacaattaccacataatgttagccagtgctggatgaatctaaattcaaggactcagggttgcagaggtctgtgggaccgtgatgttttctttgttgagtgcagttgtaaatttatttcttctttttatagcttgtaagtaaaaaatacatcattcttcagcattttgcctcattaatgtctagcaaagacatgctatgaggagagactacttaaacaaaagatgaagtaaacaattaaacaggcttagggaatgtgaaactaataatgttggggcttataacattcagacccctccattctctttcacctctttttcttcctttaaaaacactgtgaggaggtacgaacataacatttcttgccaaatatttttgttctttcacagtgggagaaagagaaagagaaagagctttctttatgtactttgctgctctgagatttcctttcctgttccctcaagatgagccttgaaacttggctcctcagtctttgaagtaccagattctagaataaaattaaatagtattcaagagcatggtgtggttctgctacttgaacctacatgttaggccacctacaacgatcagatatttgggctgtagaatattacatgtccttcaaagaatgcattctgaaatggatttgttttcctacataattcccaatgcaataactctgaagaataaagtttgtagcaggaatttatgatatacatttctgtggttttttttttttttttttttttttttttgagacggagtttcgctcttattgcccaggctggagtgcaatggcatgatctcagctcaccgcaacctccgcctcccaggttcaagctattctcctgcctcagcctccctagtagctgggattacaggcatgtgccaccatgccaggctaattttgtatttttagtagagacagggtttttccatgttggtcaggctggtctcgaactcctgacctcaggtgatctgcctgcctcagcctcccaaaatgctgggattacaggcgtgagccactacgcccggcctgtgatacacatttctattggctctgcaatgttaggtgctatccaaagactttttaatccttctaagaactccttttcatttacagtagaaaaatgatgtagtgtgcaggccaagggaaactgtgttccaaagaataactaatcatctatctttttgacagttttttatgttccaggtgtaaagttactgttccaggtattttcctgtgtaatgtcatttacttttcaccacaacactggatttggtgttttaaactctatttaatagatgagattgagactcagaggttttgtgacttgcctcgtgccacgtaactagcagtagcagatcctgtacttaaatcaagattcatgactcctcatcttccttttttgttcttccttcccatgcttcctttgtgtcccagtgaatgcatgatagaatttgtttatctgcttacaataaaatctacaaaattaataatcttgtgctattttctattccagccatgtcaagttatcaattattttttttattggagacagggtgacaatataatttatttttcaaaacaggatacttttgagagttaaaaggagtgctattaattatgcacggagaaagcaagcttatatcaaaattatccaaggcaaactagaatctataaatgccctcattatttaaaaagctagaggtaatatggcttagtagttagaagtagcagctctggaggcagagctaagttcaaatcctgattctactatttactagccatcttatatttgtcaaactgcctcaccactatgcctcagtttccctgtatataaaataaaaataatattattaataccatttaattgtattttaaatgaggttatacatgcatagcattaggaaagaggaaacccttgataagtattgtctattattacgcatggagaaagagtgatttctgtcattatgctttgagtggtatcaaaagacttgcctgaagataaatacagcttcatttctatagtcagtccttagaattaaagcatagttttctgaaagcgttacctaataagttctcaataaatatttactaaaggaatgaatgaataagttatcccagaggaataaaatgtgctagcatccatggttacaaggataatttgtatttcaaaaaagacataaaagtatagtggtgggctaggtaagttttgatgatagcagtgggtgggtgggaattggggtaggagaaatatttagcacctgatgatcctgggagggctgattcagatgggatatgggagttctaggtggctctgggccagtgaaacagttctggattccagggggaaggaagggatggaaatggaagaggccattacacaaatgctatctacacaaaaattttattggtgttatgtgctagaaaaggggaaatagccctgtcatgccaggaacatttgcccttggaattagactaactttattaagcttgggtaagtcccctgggcaagcagccccagctatttcattggtaaattatacatacatctaccttatagggctgttgtgaggattagaatgaagtaagtgtctgcatgtgtgtgtatgcatgtatataacatcctgcttattatagaaactcaacaaatgatagcttctataattattaaggatcgtaacaattacccaactcaaattttgaagaattttgaagtaaagtgtttgaaagctctttatgaatataaagtactttacaaagatatggacttgctatgaatgctgacattgtcctgtttaccagctctagaccttggatgtactgctattagaaaatagcgtgtttcatattcacatggtcagagttgtaaagattcagaatcagtgagactgatatgcatgctaagggtattgaagtgaaactttaaggcataattgttctttttgttcttgttattagtttatcctttttgaattctgagatcataggatatgggatattagtttgatgtctgcaaaaccaatcgaactccaagtattttgcttcttaagctgttgcttttaggatggcctttaggatgcgtagtgggtaaatcttcattcatttgcacattctaaaaatatatttttataagtcttttatatcccccaaatggttatttcaactatatttcagataaataggtttctaaagttgcttttatgttctcttaagaactcattctgatattctagctccaatcttataaacaatcctggaaatgttaacttcaattttctcagatgcaaaacgaagataacactactttatgtggttattgactagattaatatgataaagcatataaagtatttgggaaagtgcattatacctataagtgtgaatattattattattcccaacttcccaaacccaagagatcctctcacctcagcatcccaagtaggctgggaccacaggtgcatgccaccacacctggttaattttttaaaaaaatattttttcctaaagatgaggtttccctatgtttcctaggctggtctcaacctcctgagctcaagcaatcctcctaccgcagcctctcaaagtgctggaattacaggtgtgagccaccacacccagctagcaccttaaatcttaatttgctaatataattgtggtttttgacattacttttaatggcaaaactgcgactatttttgcaccaacctaatataaacaacttcaggacacactgtcataataatgaccatttatcaacctctgcatgttgtatacattctctattccataatggtcttgcaagattcttctcccctttttagagatgggggaaacctccacagagatatagttacttactcaaggtcatgcaggccaggtgcagtggctcacacctgtaatcccagctctttgggagctgaggcgggcagatcacttaaggtcaggagtttgagaccaacctggccaacaaggcaaaactctgtctctactaaaaacacaaaaaagtttgcccagcatggcggcatgcacctgtagtcccagctactggggaggctgaggcacgagaattgcttgaacccaggagacggaggatacagtgagccaagatggtgccactgcactccagcctgggcaacggagcaacactccgtttcaaaaaacaaaacaaaacaaaaggtcatacagacaggaaacgggaaaatgaagctgcaaacacaagcttgctgacccttgcccttgtgcagtttccacagtaccacatcaattcttcatctttaaactctgtgatgtcccatttcaaaatgccctagttggcttcttttaaaaaaaaaaatcaaattctctcatttcttgagcacttactatgggctaggcatgtaataggccctgtgatatggaagtgaatacaagcctggcttcctgtccttgagaaattcagtctagtggagaaggagagctccattcatttatataaatagaaggaatctctagttttttctttttaaggagattaaaattattgattgacataaaatttttgtatttggtgttacatacggatatgtagtatacatacatatatattatttttataatttgaaaactttcaaacttcaaattatgaaagtacaaatgaatgctgattatgttgctgttctatgtaagagttgacgataatggaaggttgtagatttagtaacacattattatgaggaactaaacatttatctgggtgtgctgtagaatgttccacaatttcctaaaagctgggtctagaaaacacggtaaaatgcaaatactcgaagatccatgaatccatgtcattttttattgggagcatggtgttatttgtattgtcactcctagaactcactgctccactttttccaccatcccctggctatttcagcttgattttataggagcagaaacaagagggaagtttgttatattttagctatgatttctttgagtcacatcaatgaaacatgctttagaacagcagagctcatagatatgacagggttgcaagatctgaaagccagatttgatgtacagtatttctttttttcccccacagtctttgactataactaataagtggtaaaattcccagtaatttgccaaatgcctgacagggttaatgaactggtgacatcaggatgctggtgcattagacacattttgtgcagaagttttgtaaagcctctcctgatggagatgcttagagatgaagcaccaatgtgctggtaaatggcctaagggtaacttagttatcctaaatagtcttaaacatattttcctaatggaaaattcttaatggaaatttttgttgtggtaagcattgaaccacttagagttgttgctctcatattccatttgtctgaaaactacagatggcaccaaaaaaccagacatattagcctaataccacagtggatgacatcaatatagtacttagggagaacttgatacactcaccataaagccttttaatcgtccctttcatagacttgggtaggcaagcctatttccaatttaaaagaaaaaataatcattcagagcaggatttgcaaaaggaattttcattcattagtgaccatcaggattattttccccaccaattttacaatcttttaggtgctgaacgccatggatttctcctcagagtggcagaaatttatcattatctgttctctggggagttaaatagattttttttaatgctccactgaggccacaattttgctattatgctcagatagccccagagcttgcagatgctggcacttctgtctttttttcagatgagtgatacaatcatgccaagaagccaaaggaacacttttaattcataagcaacttcattacatagtttggttacattgaaagtctgcctaacatcccacaaaatctgtcctcaaaccacagagtttattttcctgagtatttataaattccaaaatcaaaatcagaacaaaagcagctcaaaaatagtgttcttggttgacagtaatgtcagaaaactggtcaactctgagagtatgtgtcaaagcgagagcattcaaactgtctgtgattcagcgttgctgcattgtggcctctacattgccccaattgtgttgcatttgtgagtcaaactcattttgcctcagcatgctgcataatgaaagcatttgttctcattctctcaccacccgccaccctactgcttcagttccaggccattacacccaaagtctctgacagagaaaaaggagctcactttagaagacttggaagggtcagcaggattgctggacttggagcaaagctctgacttaatttatgtccattggttatttagagagagcttagctgtttgtactttgttttccagccataggaggaaggagctacagcatatgtcttcaaaagctgtttcttttgccatgtgtgatatagactatgggctataggttctgtttagagcatagtcgttcattcatcaggggcaaattctcaagtgtaaacatgaattactcctaccttcagtctgttgttaagccctttgctttatttaagcaagtaacaattctgagaggtaaaatctgtgcactggaaacaaaatagaaaccatttttaccagaacaaaaagagaagggagaaaaaaaggattgaggaatgcagcataaaacttctcagcttattgagatttccttttccttgtagaaaagacagataaatgtgtgagtgctggtaatgcttttctcaagtaaagaaagacacctttgatgtcgcattcctgacctcagatgctaaggaacgaggttaaagagcttttggtcaagtttttactgctgctatgtggctggtttggataaacactgtaaatgccaggctcaaactgcctgtttttttagctgtcatttctgctgtcaccaacctgagaacttcagggcttctccctttattcagccttggaaccacggccacagtcacttacttacctgctccttccagtgagccaccaccctcatagtgaagctgttctttaaagaccaaaccacttagctccagcgtgaggatgctcaacatatgaactacatacagatacgccaataaagtgaagcctctgtatgaaaggggacgataactcctcaatcatgaattcttttcttccattttccttgtccggcgcactctcccctctgcttcttttccagctggtgatctgacaagtcatatttctcttacagccgaggttagagaagctctttctctgagcttctctgataactgttcactgaggaagtggccaattctttaaattttcattcaggcaaaactaaaaccatggctctcttcaaacaccttgcatagctatagcttctggtcccccatgacagaagttgtttctctctcctgggttttcctgggagcctggggttctttgacccagtctgccaatattccctttctttgttcaatgccttttgttcatgtcttcatccttgttacttttttcattttccccttctccacaataggagttcaaatggaaaacatcatctgtctcaagcaaaagttatttgcatacatggttataaagaaaagcaactgattttctttaacctctcaggatcagcctctttattttttacatttcataagagtggtaagaggattgccgatcagaaattagttggccattaaaatttcctcatctgtgaaaatgaagggattaaaacagataatcttttaaggatctttctagccctaaaaatatccatggcactgatgatgttttgtctttttatgggggaggccagatggatgctcagctctccatgctgtgcatctgcttggtgagtggcttgaacatctgtttgggacctgtaataccaaggcattgcaattccccttgctcaccgtttcagctagcagcggcagaatgcctctccagaaggtgtcagcactcttgtctctggaagagctttttattcccattatttccaagaataataagaactagtttcctgtatatttcctttttgaggctgggagatctattttgtggtagtgaagaaaatatgcatattcttctcaaatatctcaaaaaaaccaggtttactatcaaatcaatattaatttatagaacataaactatagatcaaacaggtgagaaaatattttgacattttatcaaaggagaagccaaccatctttatcaatagactttattttttagaacattgtacgtttatagaaaaattgagcaaatagtacagagttctgggattatcctctccccttaatttcttctattattaacattttatattagcatggcatatttattgcaattaataataaattattattaaataaagttatcgtgttattattaactaaagtccatagtttattgagatttttaaagtttttaaccaaatgccccttttctcttctaggataccaaatttatatagtcgtgtcttattagtctcctcttggctgtaacagcttcatgggctttctttgttttttatgctcttgacaattttgaggagtactggttaagtatattgtgggatatccctttattgaaatgtgtctgatgattttctcataattagactggattacatgttttgatcacagaataaagtgccattttcatcacgttatatcaagagtagcactgtgaacatgacagtgctgttgatgtgaactctggtcacttggctgacagtgtttatatgatttctccactgaagccaaccatttttaaaccagtgttgactattccttcaaataaaaattctagattccatatttggaaattaatttaaaattaacttgagaaaagaccttgaaaataataaaaacaaatgaaagagttcattttcttctttctcctgtctaatgaacatagacgtaaataactaagctcatggcttactcagacctttttccaagagaaagaatttttttgtagttgacacagcaggagataaaaggggaggaagcagaggatggtatttttctctgggatgtgtcagctccatgaagaaattgctgccctacagacactgatccacgactgtcagttcagatatttcattctggctgagaggcagtgaaagaaatgaccaccgaggagggtatttccagcatttctaacacctcacttagggaagggaaaggcattacctaagccttgtgtgctgctttctagctcaactctaaccaagttgatgggggctgtgaagcctttcctgtgggtgtagtctcattgtttttatttaacaatgagtgaaagcaatagtacaaagacttgaatatctttatgcatattttaataataatgaaagttaggaaagtaacttctttaacagaatacagatgtgacattagtaattaggattccaaataccacatattggagttaagaaaaaaggagttccctttcaattaaactgattgcttaaatttgtgtatttacatattttcttagtgacatccaaaataattttaaactatttataattttctcattttgttagttgttatttacattattactaagatgaacatgcatatacaatttcttcttttttctccctctggccccataaaaacccaattttcttagccattagcattgatgagaggattctaaactagattttctctgtaggattgggtacaacgtaggcacctaacagaatgaactattttatgaatagtagaaataagttataagtagtatgagaattatattacttcttctgcatttctaatatccatcacatcttcagttttagtggtagtgtcttagttcccatcttcattttctctgcttttcatcaatccatccctgtagccagagcaaattttcaaatattaaacttaatcaaatcctttgtccatatctgcacaccatgatgactctggattgctgtcattagttttccatcctgcatcccctatatgattataagatctgtgagtgcaggaacagtgtctcattcacctttgaacaaccccctgcacactgtagactcaaaaaccacaggctgaatgaatgaatgaatgaatgatatagctattttgggaggtcatctctccatatagaccaaaattttggtgttgtttttgtattactggccacatttcatgaggctcttaaaaaagtcttctgtggaaattttcaaatatggaccaaagtaaggagaataatataaggtgtctcatgtatccacttagcttcaaaaatcgtcatcattttactaattttgttccatctgtcttccaccccacatttttttggtttcatttttctggagcattttaaagtgaacaccagacattatgtcattttacctgtgaatgttttattatgctctaactagtaagacatttaaaaaaaccatatccaccatgccattattacccctctttaagatagtttaatatcaaatatctaatatccttatctccctgattgtctcctatctcaaacctgcctttttttctcaattggtttgttcagatcaggatccgaacatggtctgtacattgctttcggttatggtgaagcattatttaaccttcacatataggggagtgtgatttatgtcaaagatggtaagtgatgatctgcataaagaatgtatttcttgatagacacgggggacttcaaaagccggggaaagggaaaaagggagataggttaaaatttatctattgggtacaatgttcactatttgaacttaccttgagaaatcctgctttgtatatttgcttaagccaatattaacccaacttaacactttccttcaagtctccctctttccatctttctccttccccccaatttccatttctattctgtcctcttaattatgtcaaaactcagcttaagtttcatcacctctgtgaagattaccctccaccaagccctttaatgcctgacccagcaatatgccatttagtttacattgccttgatttataaaagcaactatgtgtaagaccaaggctttatgaagcaggaaaacctagatttggttttcattcctgccattgagcaatatggtgttggacaagagcctcactttccttgtctacagaatgtggataataggagggttttcatgaggttgttttgaataccagttgagataatgtatgtagtcaatataatttttggtacttgggaacacactataagttataagtttttattattaacttttttggtttaattatgtcatctccaactacattggaaggcacctatataatgccttatacactgttagcacttcatacctttttgtagggagtcatttttttggggtattagagtgaccacttttagcccctgggatttcaacagccatctaactattcatccaattattcagatatgggtttttagtagttgtgattggataactataaggtataaatgcaagcatacgttccagaaaatggccagaatgtgagggaaagcaactgtatctattatttagtattttagtgcttgttaaagttaggagaaaaaaatactaggttaaaattagtgagtcttcatctttataggaagtttttaaataaagtttagggaggaaagagatgctgataagctgatgctgaaagtatctgtctagttaattttttgttacaaatggttttcagtgttgtttctttgcaacctcaaaacaaaatccctgccttaaaagaagaaaaagcccagccatggtggctctgcctgtaatcccagcattttgggaggctgaggcaggcggaccatgaggtcaggagttcgagaccagcctgaccaacatggtgaaaccccgtctctactaaaaatacaaaaattagccgggcacggtggcacgtgcctgtaatcccagctactcaggaaggaggctgaggcaggagaatcgcttaaacccaggaggcagaggttgcagtgagccaagatcatgccactgcactccagcctgggcgacagagtgagactctgtctcaaaaaaaaaaaaaaggaagaagaagaaaaagagatgtaatatatttcaccatggaaagttattcaacagccaggggccaggagaatcaaattaaattgaattgtgaatctgaaggcagccaggaaagtgcattttaaactgagctaagcacaagacactgcatcattaagagaggagagttacagactcacagtgaagaggagagcacttaaattgctcttgagtttcctggagaagaataaacatgtatgcaaaagcccaggaactggtttttcagtttcaaaaggaaataatgtgtgttctgtcagtggagctgagtattcaaaggctctacagatcatcccaatgggagctggaagcaaggacttgaagcagtagctttgtgtctttggcagtctcttgaaattgggactaaaattaaaagtagctgagtgcaaccagttctaaatgtcagatggaacactttgctcagcatgctgtgcacaacattgattttcctatgttccacattgttgtgtgagatgttgaatcaggttcctgttggcgcattcactaatataagagctggaaagcaacttggtccacaattaatattctgtgatgctattgtctgtatgccttggactttaattgggccaggtttttgtgaacctcttttattcttttgacacctggaggctatgttcttcttatttcaatttgattagtctttttcgtagaaagttcttatgaatgcttaaatgttgtcctttctgaatttgtactaagacacagagaggattgttcaccacatgcgaagtgaactatgggaagatttttttcaaagaagtattatggtagctatctgataactgtcattacatacacagttccaagggaatttaaaaacagggttgtgatttcagtgtctgaatatgtgtttataattttaatagctcctattaaggtttatgtgaatgtggacaccacatctgttgaaattataatcttttaatctagacaaagagtagatcaagtaagataaggggaagaaagaggactgtgggcattgaacagggtgtgtgccagagggctattcccgggagttcagagagcctcctggaaactgaagaatgacacttccttgactccatccataatagctctaaatattaatggttcacaagagagagagtgaaaaccctctggacaagaaaatccaggaattgtttcacactgggctatggtcctcaaacttccagctgcaccaaaattatctggaagccttgttaaaacatatagtattgggccccacttccagtttctcattggaaggtggaggggagcccaataatttgcgtctctgacgagtttccaggtgatgctcattcttctggtctaggaaccactggtataaggcagtgattcttgccatattttcctatgctttaatatgcagagggatcatcttggagagtttgtagaaagtgtagtctttaaaaattatactgagatgggactcaacactgagatttctgaaaaagcacccttagtgattctgctataattggtccagggatcctaagccattgcatcatttctaacacttagtatttgagtctttcatgttttcataaccatttatgggcttgaatgtcagtgaatggctgttaaagttccaatatgctttgaaaaataagagaaaataaagtagaagcatggccatatattagtggcttaatgataccagaggtgaaatcaaatctcatgaaagtctgatatattgtgattcaataatgtgagcagttagcataacctgatgtaatataacaagattttggcattaaaaacttgtccaatctcttgatattgtgtaacatgtaaataaatcaaatcttttgaaaggaagcagcaaaatataataaaaaaagaagacttctgtgatgcatgtatcctggctctggcatttacaatgctggtcaggtcacgtaaactttatgatgtttagtttttcttacctgtaaaggagacttagtaattcctattttaccatgtgtcatgaaggataaatagatacgatatatgagatggctagtgtagcttctgacatattgtagatgtttaacaaatggcagttataaaaggaagaagaaggggtaggccacacgcatctgtcatttcttagtttttgtcattgactgttaggtagggaatgcttatccaatttaatactctttggtcagcaatttcagccaatgctttttcatgcatttagacagactctgaaagtaaacataatctctcaagattcttatgaatctacttatgattgaatggacattctcatatttttaaaaatctatttctcttacagattaataggctatttttcatcttttatcacattctgttttggctactttactgaactcttgaaatgttcaaatatttttgctttgctcttttgcatttataatagtggctttttaaaatgaagaactccatcagtgcctcctataagcttattttgatttgaaatatggaaactgttcttaatgataaattgaaatgatttcaaacttctaatattttctcttttttatccttttaggtaagtaatgaaaagagacatgaagaattggtatttcaaatgaccaccatgttgcaaaaggtacttttggtattttaaatattactttaaaggaatcttataaaaagacacggaggttagaatgtaattaagtactattttggtaaaaacaatttttatgaaaacagatttaaagatgttatagcattaacaattttttaattataagaaatgtaatatactataagacttttctttctgtagtctaggcaattatcattggtatcatttgggaatgaaaaggtaaatagattgtctcttcctcaagatattcattgctggaaaaagggaggtggaggaaagaaatctgaatacaatagacataataaacacattgggatttgttcaccaaagtcatctattttctctaagggcttatgaatttgttttctgtgatcagaacattatcttcataattacttataaaattgattgctataaggttgtcaataaagttatttgattctaaataattcaaatagattgcatccatgtggagaattctccagattctacatttaaatcaaggggaaggagggaagaaggaaatattagacttaaatgatagaatgtaaaaattcttagtctatttatatcgcacacatgatttggggaaatctgcttgtatttttaagtcgtgaatctcatctagaagaatccgtttcttttctagaaggaatctacgaaatattgtgaaaatcatctcatttggttacagaggaaacaattacatggtgaactattagatgagttgtatgacaccattaacattgacaatcatgcaaatatccatgatgtttcaggtgcaataaataacatatggtgcctttgtactagattagtaatttaatccaagaacagaagatatgccagaatgccaaaagaggagaaatcaacttagctttttaataaaattgcaatttttaaagcatttctcattttgcttagaaatttcctcaaggccttacaaaattcaggtcatgtactattgaagataagataaaaggagtggggaataacttaaaattttatcctctttgaatgataattatttaacatacattttctatacttcatggctattcttttgagtgctaaaggagaaatagacaattttattaatgttggtaatgagataacattaatcagcttaggctattttctttttgtttttgttttgttttttgagacagggtctccctctgtcacccaggctggagtgcagtggcacaatcatggctcagtgcagcctccaccttccgggctcaagtgatcctcccacctcagcctgctgagtagctggaactacagacttgcaccaccatgcccgactaatttttgatttttttgtagagatgggttctgactatgttgcccaggctggtcgtgagctcctgagctcaagtgatctgcccacctcagcctcccacagtgctgggattataggcatgagtcactgcgcctggccagcttgggctatttttagaagggcagatattactctgctttattacataattaatattattatatgaatatattccaatacattttgcttcatttgagacttccaggtataaaagctaagtcagaaattggatagatgaatcttagaagctcagaggaaagatctgtgattatagtatgataaaggagaaccaattccacttcttgacaaagaagggaagaataatgatttggtagggagtgtcaaatgttgctgacaggtcaagaaagatgaatgcatcaacaaaccaactggagttttacatataaatgtcctcagtaactttggcaagggaagtttcagtagagaagcaggggtagaaaccagaccggattagtttgagaagtaaataagagataaggggatagagttagcaaaaaagatagctttttgaaaattttgtcaggaaataaaagtgcggagaatccagcgtctggatagggaagttgggatgagagagtcttgaacatgtttacattttaatgggaacagtgcagaagaaggagagagattggaggtatgggtttctgaaaaggaaggaagtgatggaggaggtggtctaggaagagggattacctatagccagtgggaaggacaacatgcacatcaacacagctaaggcaatctctgtaggatgcgtgcagatacagataggtttgtagatttggtagggaaaattgaaggggatgtcaagaaaaatttgtattttctctgtgaagaagatgtggccagagtagttaatgaggatttgaggaaaagggcaaggattgaagtatcgtttgtggagaatgagagagagagagaggtcaatattagattaggcaagtattgatgactgggaatttgtagtatcatcaaactccttaaatttataagtgtattatgtacatgaatattactctctaaaaatcagaaatcagggatcatctgttttgagggaaggtataagaaagatttgactcttcttttcttaggtcctcagttttggtatgtgtcctaataagagcattttcatggcaaaatttaagaacactttttgaccttgaagaaaggattactttaacactacaaaatatatgtcctttttgccatgactgaagagagcctgctgtccttactcaggtgtccttaggtaggcacattctttctgctctgctaagcattctttggacagtagagttagactgaaagtgttaaacaggccctgaagatgaaagacttcagtttgctgactttgaattataagaaggttaatatgtccatttaactagaaactctaaatttctgtgtcccatttgacttttaggagtgtttacttgagggcatagagctctttgtaagactgaagggatcttttagttcaggtacttaaatttttttctttgttagctgcaaaaccattttgaaaaataaaatctggcattagcaaagagaactattctgattacagtgggcatgcaggatgtggaacccacccacttatccctcttctttcccctcctcctcatcctactttcaggaagttcccctgagacatcctcattgaatctggtggctccattgaacattgtttgaaaagtacaattctaggtgatcacaactatattgaatttcatcaaaacatgaaattcttaagataaattaactgttgtttgaggataatttttttctttacaattaaaataggcaggttagtatctactttaacctaaagtataaattcttaccttatattgataattttagtgatagtatatactaattttatcaaggaagctcagcaaaaatcactgctaaatatattacaaatctgggatttgaaaagccaagcccttcttttaattaattttgctgaccaggattaccaaagttcgttaatgtggagcccttcactaagctcatgagtagaactgttcttcgttatcctcaaaggatagacatatgactgtggcagagaggattaactgccctgacattgagcagccatgaaagcatgtagtatgagttaccaggatgttgcttttccattagggtatgactttgcctagggctgaaaacatccataaagatgggatagaagttttcaagaaaaccatacttttatgttggaaagcaaagtattgataaggtagaaaagccaatataagaaatggttaaaagagggttaaactggagtatgaagaacttgctaacagagttataaagacaaattaaagagggccgtttaacttgagttattgttaatagtcagcaatgcaatgaggtggatattataacttggttttacatttgatgaaatggaggctcatagaggttaagtaacttgtcaaactcatactgcaaatcaccagcaaatgtggcagagccaaaattcagatccagatcattttattttaagaccaaaatgggctggtgaagtcagaccaaacaaacagacagctaggataagatgtagttgagactggagagacatagcaagaaaagggctggtcttcaaaatcagagagtgctactcaagtcaaatacctgcaatggctcactgagaaaaaagtggctttgagagtccaatgaaggtttatatccttagaacctgcttcctgtttagtcacttcctctcaaccttccctctaaaaactataatgattagaggactgtctctgcagggcttaggacttatgccaccaaaagctgttaatattgaggtcagataggaagatctctggctggctgaggactccccatggttttcctgactttgtaagtctggcgcattgattggctttcattccaaaactcatttcctgctgaaggtgaatcagctcagtctggccagtgtccctgccatcttctattctgctgtagagccctgaaccacacattaagatctgtacctatggcacatgaaatcttgttctagttatacagaagaaaatcacaaaaggaaatgagaataattaaaagggttaaatatgaaatcatatggaccagatataaaattttgtctcaagtttttaaaagttattttcaaggcctaggaggaccactgggacgactggaagaaaatagcgaagactaaactttttagatactggggaatagaataccttgcattaacgtgattattgataattgtatatttctgtttgcatgtgatgccaaaaatcttttgtatacttcagtggtgttaatttcccatctacttgtgtaaactaggtgtaatctttgagccatttcctgaagtgatggaatattcaccctttgttctggtcaataattgtaacataatttgcttaaatttagataactgaagcttggtattttctggaattctttttcctgaagaacatacataattgggagtaatgatagagttaagtttgttaatcttaatccatttattgtttctaaccatcaaatcaaatgggagatttctagtctctcatctaaacttaatagatatcttatccttgtattactgtaactgtattttatatgcagttcttgtgaccacagaaaataattctcttttgtttcctactatttttttgttttgttttgttttgggttaaaatggtttataatctacattaaaactcttttctgtccttatatgaaaaaagatgaaaatgaaaactcaataaaccaaagtagcacggatttttctgaaagaaaagaactgaattttggggaaaaagtattcactctgtgatgagcgtttctgtaccctacctggaaccaattccttattttgtggtcagtctatgtatagcagagactgtgtcgaaggtattggtatctgataaaagtgaacaaagttctaatgagctcattcatttttttacttttttcaaagcaaagatttttttcttcctttcccacaatttctccatttaattcatacacattaattgtaattctagaaatgctagtaattctctattatagttactatgatggtcatagaattaattaaggttacaacagtaaaatttgtgttaattattattaaccatattctttagtgttaaaattttgcaaacaaataaataatagaataagcataagtttctacaaacttatatgaatcacagtgatctccaatatctgcgtttacatgcttagaggcaaaacatataaagaaacaggaacttagcctaatcagtgaactaaatctgaaaatacggatctcacagaaaagatcatgccctcctcagcgtgaatctggcccgcttcattttgctttcctcagctggggctgttcagtggtgcaaagaaaacattgtaaaatgcttacggcttttagaagtgcttctgagttctttaaataatggtaagagttgcaaatcttataggaaggacctgtcacagaaaagctttattcagttgcacagggaatggtgaactcgttactgagagctgctctaaagagaaacacttataagaaaggggtactgaagtattcattatcgtaaaacttaaagagaacaaatgtgtgtttcattgcacatctaaacctaatatctgtaaagggggtctgtggcagccagcagagggagaaagtgaaattctgcagacggataaaaaggaactttcaacacccagcttatttttttggcagagattcaatgcactgggaattgtccagcaaaatgggttgcacttggcagatctgcaaatatgcatatttctgctcagtaccatcaggcaaacatagagacttccagaggaactaattatcttttgtcttttttaccttagaaagaggataatatttggaagacaactattaagagattttagaggcaatgtttaaaaaaatgttgaaagagaattctatatttagccttcttttaaaaagtttttaatacccatttgtgctcccaaaataatttatcataattggcagaagctcaaaccatttggtttataatttgaagacttttgtttattatttgccttttttttttttttttttttagatggagtctcgctctgtcgacaggctggagtgcagtggcacgatctcagctcactgcaacgtccgactcccgggttcaagcaattctcctgcctcagcctcccgagtagctgggattccaggcatgagccaccatgcccagctaatttttgtatttttagtagagactttagtagagacggggtttcaccatgttggccaagatggtgctttttttttttttttttttttagagatggtatatctcggctgggcgcagtggctcatgcctgtaatctcaacactttgggaggccgaggcgggcggatcacgaggtcaggagatatagttaactaatctagttagccatcctggctaacacggtgaaaccccgtctctactaaaaatacaaaaaattagccgggcgtggtggttggcacctgtacttcctcatactccggaggctgaggcaggagaatggcgtgaacctgggaggcggagcgtgcagtgagcggagatcgaaccactgcactccagcctgggcaacagagcgatatatctcactatgttgcccaagctggacttgaactcttgggctcaagagatcctcccacttcagcctgttgaatagctgggactatgggtgcgtgcccacacctggctgccattatcaatatatttttaaacaaactctgttgctatgtttttccttattatgttgtcattgacactagagagaagctaaagttgctctatatattttgtcaggtcattgagataaaaaaagaaaaaagctatctacatcagatatttagagaatatttgagttagctagaaaaatagtttaagtttttaaagtgagttagctaaaaatacatctgtttaattgattattgtgttaataattatgtcttctttgttgttaagaaactgatgtgggccaggcgtggtggctcacgcctgtaatcccagcactttgggaggctgaggcaggtggatcacgaggtcaggagatcgagaccatcctggctaacacagtgaaaccccgtctctactaaaaatacaaaaaattagccgaacgtggtggcgggcgcctgtagtcccagctactcgggaggctgaggcaggagaatggtgtggaccccggaggtggagtttgcagtgagccaagatcgtgccactgcactccagcctgggtgacagagcgagactccgtttcaaaaaaaaaaaaaaagaaactgatgtggcactttagggacggcaagtgcagttcaaaacaaattttccactttctgatgaatattttttaagtgacaacaattggaaaaagagaaggaaccggttatgtgagccagttgtttccaaacatacttattttctatgaaaagatgaccaaaccctgataccctgataaaacatattactttagaagccatttattcctacttaaaagttcccaagcaaaatttcactcgtgtaatattgaatttaagaaaattaatctagttgccattttttgagtggggtaaggggtggtgtatattatgattttcctatccctcccattttcttatcttttaagtggggaatcccaaagtaaaaatatatattcctagaaaagtaacctggaaaatatcacacaattatgagagcttaatagaggatagcccacactatggtttctagaagaccaaatttgtgagcagcctaatttattttgatattattaggaagaagtcagccatgtgaccagagtgaagtagagatatgtatatgtaaattaaataatttttaggttctagtcccagttacttgggaggctgaggtgggaggatagctagagcccaggagttcaagtccagcctgggcaacatagtgagaccatgtctttaaaataaataaataaataaatattaaaaaataattttcagattctagaaatgactacatctaggaagacatgatgtaatgaatgttgatgggggtggtgtggggtaggggaagcactagactgaaaatctgctgaagtctctaaggttttttccaaatttataattttatgttataatatgtagatgattggaacaaagtgcactacataggctcgggatgcctatgtaaccgtaaaaaaactcatattagctccagtggtagagtacagagttcttcatatctattgttgctaggatcaatcccattctaaccatccaaattatttgataatagcatagtgctatattaaatattacttgaatattaaaatttatgtaaatggccagtaatggatacttaattacctttctgtaatgtagagttttatggtaaaatgaagcttattgtaaaggattttgactagtataattatttttcctgttgaatatgtaaagtcaatattatcagtctctctgtgttacctaggcttgccttgaactcctgggctcaaacgatcctaccacctcaacctcctgtacacagtatattttaatgttaaaacaattgattttactttggacttttacttattccaaactttcttaatactgtgtttctgatcaggattaatttttgaataatacattttgaaactatacatttttggattttgctcagttaagttttggaatctgtatatgagtttaataccttgaattctctggatggttaaaaatatgtttatagcctctctttccctcatttgtacaaatttacagattgcctcatctataaacttgttagatatgcatcataaagttgtacagatatacctgtttttgttcagtaacttgaaagccctatttggaaatcatagagaagttataacatagtgcatggactagagtttgaaagagatccaaaccttataaaaatgagtcaatttgccatggaatttagataaatacagcattttgaaatattttttctctatatatttttaaatattagataacttttcatggatattcatcctgtcttttttttgatgggaatattttgttgagtaatagtaacatctataattcttactttctactaaggaactcaggcacatcacactttgagatagtttttttggggtttcttttcaggtagatttttattaccctccttttgtgaaagtggaaactggggcttctgtaacttgtttgggtcatatcagtggtggttcaagtagacttcaaatccacctgtctgactccaaaactcatgcttttaatcatgaagtcaaactgtaatttacgtatctaaatacatctataattgttttatataaagataataatgaaaaacccatttgtgttactgttattatatcagtcatttacagaattggcatagggtaaaattaggtgtgcatatcgtatctaaagtgaactaaaatctggctgggcatcgtggctcacgccggtaatccccgtactttgggaggctgaggtgggcagatcacttgaggccaggagttggagaccagcctggccaacatgatggaaccccgtctctattaaaaatacaaaaaaattagccgggcgtggtggcacaagcccgtaatcccagctacccgggaggctgaggtagaagaatcacttgaacccagaggaggatggcgccactgcactccagcctaggtgacagagcaagactctgtctcaaaaagaaaagaaaagaaaagaaaaaaatagtgaactaaaatctgatttttcccttatttgcttacttttctttctgtgatctgaggaaaacaaaaggacccagcccatgtggcttcatattgggaagaagaggcacccactgtttcctaaaatttagagctagaaggggttggaaagagccgatcctacccctgtttttttagaatcaaattcctgtatcacagttgaaatgattgtcaaaggtaagagcataatgtttgtctgttgggggaaaagtctgttggggatacctgaaggaatacatgaatttgaagatgggaattctatttttggaaagcttaatgcagcaaaggctgatataatagcaagtgacggctgcctctggggctgagtccccatgactactgctttctcctgaataattactggaaaatacatctaaactaaagtttatgactaaatttagggcctatatgttctgattttccccagataataaggctatgagttctactgaattgaactgagttacagaaattagattttcatgcctttcctagttgttactgttctttatacagcttacatattttttagagcagggatcttcttaacttcaagatcctcagggactcaaagttcatgatgggagctcagcaaatgtactgggatagacagataaacggtatttgtgtacgtcaaacttgatctaaagaccactttaccaagaacatgaggcccaacagaaaaataagactttaaatagatgtttttaaaggataagttccaaagaaaaatataaaatggggtctattttaaattttaaagactggtagcaagatagtatgaattattttttcatttggccaggtgcagtggctcatccctatagtcccaacactttgggaggccgagttgggtggatcacttgagtccaggagttcaacaccagcctcagcaatggggtgaatccccgtctctacaaaaaatttacaaaaaaattaactgggcatggtggcatacacctgtagtctcagctatttggaaggctgaggtgggaggagcccttgagcctgggaggatgaggctgcagtaagtcgagattgcaccactgcactccagcctgggcaacagagtgagactctgtttcaaaaaaaaaataaataaataaataaataataaatacatttttttcaatttatttttggatttaatcttgagtttgctttcattattgaggctttgcaattttatttctgggcacatgaatttgcttagtataattattatataagtatatactcactataacatttgtcttttatcacagaattttatatacggaacataaaaaattaatatatgcaaaaagttttccattcctgcgtaactctttggtgtttttaattgtcagatattattgatatttagatgctccattgagaaaaactgttgtgtgagtttcattaagataaaaagttaaactacctagtaaaagtatatttgttttatagcttaaacaggaccatttacttgtgaattttgaatgttacaatttctgaattaataaaccagtcacatgaatctgcaggatttttgtgttctgacatggttctgatgaggaaatgggctaatattaaacctaatagtttatggatataagtgacaaaaatctgcctttttcagttattgaaagttactgcactaaatgcactatactaaagcatcttaataactgagcaggactatgagcctcagtgatagaaaataggagaatgtggggttattaatcaaaatcacctttaatgtgcatcataattctacatctaaattatggttatgaagcagaggaaactgatctgtaaaaatttgaataatcaatgcataaataaaattcctgccttcaatctattacatatttaagtatttcaatgaaacatttgtagtctgtatatttggtagcagtttggatagcgatgttactgcgagtaaaagtgtcaactttctaccaagacctctttctccttaatggctgggattgagtccctttaatatctcccattcctagcacaaggtcagacacattaaaaaagtaaaaagcaaacaaaaccccaaaactctgatacacatttgtcagataaatgaataggtgagaatttatgagaatatcttcaactagtataatagcatcaggattttctattcaatgtattttaataagcaatttaatgatcaaattatatatctcattatatataaagtactgtgatagatacttcagtggcattaagatgtcttaaacagggccctgattttaaggaactcagaatcataaagaaaatatatagggacaacttaaattccagtgccataaatgctaagggagcagagaggcatggcttgaataaagaccaatggatgttctggaaattaggaaacgcatatgcaaaggcagggggatgtgagaaacatgcaaattccagagcagcaagtcattccagatagctagacctcacggtttgtggacattataggcttaagctgtggtgtccaagaaccacacaactactttatgctaccaactttctgctaaagtgacaagcaccacaatgaaaaagagcttctaacagactctttattgataactctcgtggatctaaaatgcattccttttcatattacatcctggtcaattctacaaacttttaatgctcccaacttccaatgttgttgcttattctcctatttaagattttgctttataactttagatttgatgtcctgaagcaatatacttatcctccaccaccaacactgccatgatcagaattcctgcggctgatacaaactgtaggactacattggaggtaaaattggaaagaaaaaaagtggagctcagttcatgagggacctttattccatgtgttacatgttgaaagtctaaagagaaagaagtggcagtgacaataaacctcaactgtttggttattaagatatattattagatgacatacatatcttggggatttatcatggttcagcattgaatccttactttgtaggctcagaaactaagtttttcagtgcactaagaagagagcagtctcttgggggtgaattcacattaagtaacctcacaggaagtgatgtataatatggactttcaatatgtattgtcacataaaattagaatagttgtgccaaattaatttggtgttctgactttatgggtcaataaaactatgtgggaacaaaatactagccaacaggtttttacataagcacgagaccagaagaaggggaaacaataatataatttgattgtcaatggcatcaggctagtacctcaaagcactacctgcataaaaaagattatctggctaccaggattggagtgctggagatttggggcctgcttattgcttcccttgcttggactggcactatcaacatctttcttctctgaccctgctttacctgtcagttctttacttatgcttttagtcaaagcatttttctgagtagtcacctattcaaaaggtaaatgggttttattacacaggccatctgattgattaggggcagcttcctggaaaagtcttgagaagggctctgagctcagccaagctcagtggactagcgtgctcctgaggtgatggttgaagtctgccccggctcagggagggtggaatgaagatagcttgatgcatttggcatccttgcataaataattcaggttatgaaagcacccgaaagaacataagtgggaaagtgacatcaacaagttttcatttagtgaaaaaaaaagatgatcaagtcaccttcccagatttgccgcacccactctcactctgaaagtaagctatttgacagtagcggggagacgtggcggaaacatccaagtccggacactagttttctttgatcgccctcaccatggctgctgcatttgttgtctgagtgaatattatttttcctgtttgaagaatagagaggggaatgatgccacactctaacaaataaaactaaaaagcatggcagtaatattaattatgtgatctactgtcttcttaagtgttttgaatgttatttggcatatcaacagaatgaatagttttggattgcaaatgattttttgtatcctttaattttcatgctgtttgctttctgtttttgaaaatttgttgaagattgtccttgacagtttgtttttctaaattcccacttgtttgtttgcttggctgttgtttatttggctacttcttgaacgtggaattcatgtttgcatatgattatatctgcataattatttgagtttatatatagctaatcaggggtggtaatatgctctgctttaattgacccctgattacttctgctttctatggaatttctattttctttcactttttagttaataaagagttatttatcattttccacatggaaatacccttttaggcctgagtaaagtagaccttttctcagcttagaagaaatctcttagtatactggaatatgcatactaatattgtcttccagctttagctccatattgacaattggcaatagcatcttttgtattagatggatttataggtgatagtgaagacttgtagcagttatatggagcagggtatagcattaaagcaatttattattttataatttgtaactccattagcgttactcagcttttatctctttatcacagttatttttatttataaatgttaactattttttaatgtatgtaaaaacaagcattattttaaattaaaaactatggaaactcactcgttgatggtcattagtgtcggttgaagtccaacgtgtcaggtaaggaaataaaacaattagtttattttatgaaggccaatttaatataattaatgtatatactaattttcatgtatgtttatttttaatgtgcctaagtattaacagtgcgagatacatagaactttcaatattctctttatttttcataagacaaatgaaataagtataataccaaatttattttccttaacaaaaagtaacaagcagaaaattcgtaaaccagcattttattcaaactcctgtcatagaaaataatcatttctttgctttaattttactaagtgttttgcaaatgtagcaaagtgttgccaaactaatgttccagttgagaaatacaaaagcgaactttaagtgcattatatctgccattaatgaaaatggaacatcttaatgcaagaataaatatcattttgattagtaaatctgtcagcctaactatagcttttctttcttgtagctattaataatttattatatttagagttgaataataatttattatatttagagttgaataataatttattatacgtagagctgaataataacattatggaattttaggtttcttgggaagggccttttcagatcatttggtccaatgatattattttaagtattgtaggagtaaaagttcctcttctctccagttagtggcaaaattaggtctagaactcgtgtctcttgcctctaagcccaggactctttttcaccactctatgttgcctctgatttatatggcatgtaatatacactaaccctttataagacacaaagtcaatctgcatttgtaatgtttaatgagaagactcagctcattcttctttttaaccaatgtttataaaacatactgtgtgctggcaacaactactgagatggttttagggagagacatggtctcatgacattagagtgggaaatgtccatatatactgccttcctatagccaaataaagtgtgttttctatcaaaaaaccagttaggaaataataaatgtttccaaaatattatacatataccagaggatgtagaatataacactaaagagacaaaatgtgttttatttctatgttttaaaaatctgaacaaagtacaacagtctttaaggatctttgattgtttaaacatgtactttacttttacttataaataatataaattgaacattaatattttaaattctcttggatttccacaggttttaccatattagttataaatagtgtgcagttcagcacagataagccatttatttgcttactttccttatatagcatgtattttcatactaccatcaaggatgctctgttctattctcatttagttgaaccctcatattcactataccatatggcacatacatgtacttgaggatcaaggagtctctcttgtgcctcacctcccacttttattgctttgaatgccaaatagaaaatagttaaatattatatttaaagttaaccctaaattaaagctgttgtatagctcatggatccctgataaaatattcagggaattttatttatttaaacacatcatgttatcagagtgtttttaatggtgattagtccaaatgaataattttatgtattattttctttttctctttttttttttttttttgaggcagggtttcgctgtattgcccaggctggagtgcagtggtgcgatctcggctcaaacaatcctctcatctcagccttccaagtagctggggctacaggcgtgtgccacgccatgctaatttttgtatttttttgtagagacggagttttgccatgttacccaggctggtcttgaattcctgagctcaagcaattctcctgcctcggcctcccaaagtgctgggattacaggcgtgagccactgcacccggctgattctgtgtattattttcttatgagaaatattttctgcattaggtttctttaagttttttttttttttttttttaactgttccataatctgacattctaaaagtataaattattttgaggattgtgaggtactattcctctaattattttttaaagagatggggtcttgccatattgcccaggctggagtgcagtggcaattcacaggtgcaatcatagcacactacaacctccaactcctgggctcaagctatcctcctgcctcaacctccagtgtatctgggactataggcacatgccagtgcacttgacttctaatttttttcaaaacttcaagggagaatttaaaataccattctatttttttttttttgcattatccactattttttcctgtgtttaaatgtttgttatcatggctgctaagaaaagtttattactttttcattgtcaaatgtcaaatagcatgatcttctgtggatactacttagaatttataataattaggctttaattcatttgtctttgaatatgtttttctgggaactgacaactgacaggtaccagatggaataaaactctggtctgaaagaagtttctgatgctggtaaccagctccagtgctgtttagcattatggcctcgaacaactgactaacatctttggacctatttcctgagttgttaaatgaagaagtagaactggataacttctaaagttccttttgattcaaatattgtaattcttgaaattgtagggctactctaactcgtcttaggtgtgcccacatacaccagtttctagaacctttggtttcctttcactgcagatttagagaggggagactggctctttctttaagagtttttaggacagaaagcattttttgagtatatctgtattgagctgcactttacttttcctcacactaacctctctaattttcttaagtggttgttcaattctccttttcatgtagcccaagggtcctatatatggctcatggtgttgcattcaatctgtgactgggtttttttactatccacatgggccgcatttaacaaaataattgacaaggaatatttaccaacgatgaaatcctgttcatctgatttagcccaactaggctgaatgttgagaaacttttaccttcagcaatgttctcaagactgtagaaaaatgatacaaagaagtaaaagacaggggatttgatttaaagatactacagtgcatattcaataatgtagttctgctaggaaatatttgtgatagtagcatagactgtttagccttgtgtgacagagtcaaagatggggtaagtcagttattttgagcaaagatttcatatagagcttatttgaatatgaaaaggaaggtcctagaagcttgatgtaataatcagtgtagacaattcaatctcagtgttgtatttaacctatttaactatggtcaaaacctgaaaaacagctttaattgaaaatgactctctaatattccttgtcactgataccaacctagcaaaacccaagctacagtagaagaggaaataaagttcttattttaggttatctcctctgtttctattattataaaagataagttgtttttactgtgtcttaaaagaaaagataatatcttacataatgctaggattttttttctagctacaaaaaataccttgaatttattattagacgtgtagatttaaatgtcacaagatatgtacttccaaaatagaggtgcagtttcatcaatcagcataccgtagtggacacattattctatctttaacatttttatattttgacatttagtagcactagattcaaagctaatcccactcaacacatagcactaaactagacatcagtgaaattaaatacatttatattccaatactttaaaaattgctctaagggataaaattgaagagttattttaaagtgtttttaatgttgttgtttcattgcctttttcaaatataatggtaaaacatttgccctagtagagtgctgtatgtagtgggtacttaatctgctaactaaaatgttaagctctatactgtggaattcctttcaaaatgaggctgattataaagctaaatgttgctgtattttttttttttaatgagcacctgtctaatgaaatcccccaaaataacaagctcaagtgatacataaaattggggaaaaataacatgagctagatatttttgaaaagaaagaaagactgtcttttgcaaatatgaattagatattaagcaaaaaattcatgactgctctaaaattagaatgttcattttaagtactcccaaagggccaagtgctgaaatttgaacagtgaaatgaacaaaatgggaactaaaatattaacattaagcaatctcttgagtaaagttgtaaaaaatagtattggtcacttttactatgttgttaagttttagatattggaatagagaggaaggaggaatttggaaaggaatataataaaacgcccagattcttggaatttgattcaaaccagaaggaaatgatctctgaaattcagcacagattttaaaataataattcttccagttgtgaaacactttagtcgcacctctgctttaatgacttggaagataattctataagtctcagtgtaaaaaatgaagaatgatatataaaaatgattttaaagttaattaaaaaggtgaagatatactgacattttaaaactaagggccttttagatttcttgaaacatctctaaaagatgtgagctggctggcgcagtggctcacgcctgtaatcccagcactttgggaggccgaggcgtggggatcacgaggtcaggagttcaagaccagcctggccaacatggtgaaaccctgtctctactaaaaatacaaaaattagttgggtgtggtggtggggcccctgtaatcccagctactcgggaggctgaggcagagaattgcttgaacccgggagacggaagctgcagtgagctgagatcgcaccactgcactccagcctgggagacaaggcaagacttcatctcagaaaaaaaaaaaagaaaaacagaaaaaaagaaaaaaaagatgtgagctgtgtatttatgggtaacacttcatcttagataaccagtgcatattctggctactgctgggtgagaaaacagctttttaaaagctgacttatcaatactatgatagccccatttagaaaacaataaaatatttaataataaggaaattgttaaattatgaaacacatatgaaattagatattatgtagccatttaaaagtagcttttaaagaaattgtaatgacaggaaaaaagtccactaccaataattttaaaatttaggatgtaaaaaagtatatctaacatgctctcaactatgttatttatatgcatagaaaaatgcaaaagaaatacatatatgacagtagtggtttttatctggatacatataatttttcttcatactttaatttcaaatttttcttacattaaatatttattactttttttttttttttttttgagacacagtctcgctctgtcgcccaggctggagtgcagtggcgcgatctcagctcattgcaagctccacctccccggttcacgcaatcctactgcctcagcctcctgagtagctgggactacaggtgcctgccaccacacccggctaattttttgtatttttagtagagacgaggtttcatcgtgttagccaggatggtctctatctcctgacctcatgatctatccgcctcggccttccaaagtgctgggattacaggcgtgagccaccgcacctggccatttatcaccttttataattagaaactacatttttaaaagcttgctgatttcaaaggtgactgtaaattacagtagtgaaaataatcattattgagtttgtgataaaagctagttttttgaaatgtacaagaaagaaaagagcaaagaatgcaaaaaacacctagattaacctgaaacgggtcaaatgcttcagtttgtctctcaagtacagcagccactgtcttagaagaataacatccatctgttttctatctgctacagtacattgcataacatttttagaaatatgcatgtttccttttactattgatacaaaagatatatctgcataacgtagatcctattgactatagaaattatgtcctgaaagaaaaatttcacttggttgaaaaaaataatagcttcaatctgcaggtccctgctaatatgaaacttggcatagtcctcctagttcccaataatagtgatagtaaatacctcaaagaaatttttaattaataaaatcaaaaggtataagtatactataaacattttctgcctacttgaatggaataaacttggaagaactttgggagattacatagaagagttggctgttacagaattataagtagtttaattaaagttgtagagcatgaaatgagtttttttcctggatttctctggtaatcaatccattattccacagttggatggaaccatggtcagcaaagggagaaagctttagtggtcatgaaaagaaaatttggtgatacttttcttttaatagaatgtttacaagtaaagtcaggcattaatagtttgtgttctagacctctacacaaaaatttcagaaataacttgcttgaatcttttattttttagccaacagtgtgtcccatcttgggctgaagtggggggaacctctatcagagtcattttaaaagttcagggacttggattctgtgactggagaatctgattcagtaggttttcagtagtgtcagggagacagtatttaaacaaaacaaagcacagcaaaacaaaacagaacagaaagcctcctccagtcattttggtgtgcagtccaaattgagaatgactgggccatatgtgccagccattgaggatacaaagaagtaagttatcaggcagatcctcatgttgttcattctctgaagagcagctcagagtctactctttaaaattggtaaaatatttctttttctaataaaaaagatcttttcctgtcatgaactcttctcccacatgttgatagtttttatgtttattgtctgaggttctaccatgccaggaatatgagggcaaagaacaggtcagtgattgattcaattatgtcagcataaattatcaaagatctgaaatgggcagaagaaatcactgggtgtctgttcactggagtgctaggtgttgtctaacagacctccaggaattatctgattctataagggtgtgcatatttgattctctttctaagctattttataacttgtagaggtagatgttaatttgtagaaaactgataaggcaaatgaatcttttccatagaaatgctaatacactttgtcaagcagaaatataattaatttctctcctagagaaaagtaatcccaaacattaaattttactgccatgtaagatactaaccagctttacatatattagcaaaatcgtttcagtatttagcatatgtggttgtccatattgtattagtccattctcacgctgctctaaggagatacctgaaactgggtaatttattaaggaaagaggtttaattgactcacagttccacaggactggggaggtgtcagaaaacttacaatcatggccaaaggggaagcaaacacatggcagcaggaaggagaatgagatctgagcaaaggggaagccctttataaaaccaccccatctggtgggaaattactcattattacaagaatagcataggcctggggagggaaccacccccatgattcaaatatctccacctggtcccacctttgacctgtggggattattacaattcaaggtgagatttgggtggggacacagccaaaccatatcacatgtacatatatcagattcacctttgaaccagttttaacatcttactgatcctctcattaattaattagctacataaaatcctttacttatatcatcttatattggtatgatagctatgactttaccattttgaaaatggtgctttaacaactataaatccttacgtgactcagatttgcctttggaatggattttccatctgggatatttctatatctgttgctctttcaagtagtggctattttcttactcgtcactacatgtcactggatcaggagacaggatattatattccctttgctcattgttgcccctttcagaagttgagacaatacattcacaagtctttctctgatatcacaacactaaaaaacagaaaaaattggtacatcatctgcccttgctttttctgaaaaatctattgtttcagatttgtcaagaaaaatcaagtatcttgcaaccattggttacatcatagtcattctcatgtcttttactaaactatagtcataaactccattgcattcactggagaaacattccttgctatcatggcaacaggcaaaacatgtcaaagtgatatgtaacttgtacatatttctctgacctgttgtatggagatgtgactttgttcctgaaacaattcaaagatattctcttttgctttctagaccaattaactttctcatactgaataaccagaacaagaaaaagctgtcactagatactttccgtagttaattaagaaaactccagctgtgccattagcctacataatttataagctctttctgattttctaacattccgataggttcattctattttaaaaaataaaaaagaagtacacttttggaatatgtcataaaaagaaacatttaccaaagagtaaaatcatctgtgataacctgcttattaaattttagaattctgattatacatttaaaaatagtacaaatacagagaaaataatactacactggacttcacattaaagtggttgctttatttttttgaactcgctttgaagtaattatacttgccagaagtgtctttcatttttctaagctgatagagttagaaaaagtcttaaatagaaaaatagtatggtactataaaaatagtatggtactataaaaaatagtatgatactgtggtatgtagttatctagtatagtactgtgagacatttccattgtcaaccataaaaatatacatttttcttaaaagatctaagatagaattttttggcaatcataattgttactggctgaactgtgtcttctctgaatttcgtatgtcgaagtcctaaccctcagtactttagaatgtggctgtacttggttatagggtctataaagggggtgattaatttaaaatgaaatcatgagtgtgggtcctaatccaagacgactggtgtccttctaagaagaggaggttgagactcagacactcacaggacaaagacacacacatgtgtgtaagaaagaccacatgaggacacagggaagagacagccatctgcaagctaaagagagaggcttcagaagaaaccagtcctacttgacacttcgatcttgaacttttagctcccagaattgtagaaaatacatttcttttgtttaacccactcatcccgtctttaggtttttttttttttttaagacagagtctcgctgtgtggcccaggttggagtgcagtggtgtgatctcagctcactgcaacctctgcctcctgggttcaagtgattcttctgtctcagcctcctgagtagctgggactacaggcgtgcaccaccatgcccagctaatttttgtatttttagtagagacggggtttcaccatgtttaccgggctggtctcgaactcccaacctcaggtgatctgcctgcctcagcctcccaaagtgctgggattacaggcgtgagccaccacacccagcctccatcttcagttttttaaattgagttcagggtagaatatgacaaccaccactcagattagtctataaataggtaaatttttacttaccagttaaaatatctttgactcctttctttggtcaaagtcaacttctgcttttaggaagtccatgatttacactactatacttctcttattggcttgaaaatgattgacatcttattaattcattaagtaaatatctgttctaaaaagggattacaatgagaaaggcaaattgccttcagaattatgaacaagtgaagaaatgaaaagatctttatggcagggaagctcctgaacttgttggcttgttgtgaccaatcttcatccattttgaggattcattgtgttattgtgttcatgggcagcactgcattaatctttcttctgtgcttctgttgtggccagcataggcactagccagctggccaggcttagtttttcctaagaaatcttctatttcttgacctcagatgactggtctctaggtgaattcagagataaatgaggtctggattacaatgagtgattgttcttgcatccagagtcaggcgcctccatggtagttctcactctcacaatctgcactgaagactcagccttagttctctctctctctgaggaccacaatcctaatgacgcccctctctgcatgaggacaggcatggtgacttgttctgtcttcttcctagaaagtagtagcctatacagatgttgaaagaaaaattatcctatgcccaggttacgagtagacattacccagttaggagactgtgataggatctgtgattcataaagtacagtctctttgagtgattgtcttgtcacttgtgaaataatgaactttttgcttccaatgtcacataatggagttggtgaatagggtgtgctgaaagggtagaggaatggaaggaggaagatctgatcagaaatgaaagctccctttttttttttaacagccattttcctgctcattgaatatgtttaggctgtgtctggtggctcacgtctgtaagcccagcactttttgggggctgaggcgggcagattgtttgagccaaggagtttcagactagcctgggcaacatggtgagacccagtctctaaaaaaaatacaaaaattagccaggtttggtgtgcacacacacctgtagtcccagctacttgggaggctgaggtgggaggatcacctgagtccagggaggtcaaggctatggtgagctgagatcacgccactgcactccagcctgggcgacagagccagaccctgtctcaaaaaaaaaaaaaagaaaagaaaatgttcaagtgttgttgaggagtgctacctctacccaggcaggggagttatagtatgaggggcacacagggaaggctggatttgactttgtaaacggttaaaaaaaaaatgtaggagtaagacttaaagtgatgacgccgggtgcagtggcccatgcctgtaatcccaggactttgggaggccgaggagggcagatcatgaggtcaggagttcaagaccagcctggccaacatggtgaaaccccgtctctactaaaaatgcaaaaagttagccaggtgtggtggtgcacgcctgtaatcccagttactcaggaggctgaggcaggagaatcccttgaacccaggaggcggaggttgcagtgagccgagaccatgccattgcactccagcctgggcgacagagcaagactccatctcgagagaaaaaaaaaaaaaagacttaaaatgatgaaaggacaacagacaaataacaagcagagcctcaagacatttacatatagaaaatgtctcagaggagaaaacaagttagacaggcattgagaagaactaccagaattttggtcagaacacaaggtcatggaggcctcaaggtatgagttgtagataggcaggaagtctgatgatttctaacagttccttcagtcctttcctcacagttatgataagaggttttaaacccagggtcgactctgcacatggctagggagaaaggctgggtgcagatgatcagagggaatttttggggaagtggttaagcagagcagggccgtggagaccggagtcttagtggttggaaataagaggcaccctgaaaaactgaggtcttcttctcaatcccattttatcgtagactcaaagcataaatctgtggttttcaagaagctgtaggattgctgtaagctaaagaaaagcttgattgaatactatttattttacgtacctttcaaagatttctttcttttctttttttttttttttttttttttgggacagagtctcactttcgccgaggctggagtgcagtggtgtgatctcagctcactgcaacctctgcctcctgggttcaagcaattcttgtgcctcagcctcccgagtagctggaattccagccatgtgccaccatgcctggctaatgtttttgtatttttagttgagacagggtttcaccttgttggccaggctggcgtttcaaagatttcgaccctgataagttccataaaggctcctgcccacttgaagtaactgtaggttggtcttgatgtttggagaatcatgtgataactctttcaaacagtatcctatgctgatttataaccccaatccagatgtctctaactatcttaataggaattgcacattttaaacaggtagagttaatatttgcttataattggaagtgacatgaaatcaaacaataaaaccttatcatgactgtaaaaaattgagaattgctgtttaatagaacataggtactgaagattcaatttaatccatatattcatacttaaaaagacaacatagaatattatagtgctcctacttttaagaactagctatttatcaacaagtgttaacttgtggtgtactaagtgcaagagacagcctttagcccgaagatagtgataaaaatgacatatttgctttgggaggctgagacgggtggatcacaaggtcaggagatcaagaccatcctggctaacatggtgaaaccccgtttctactaaaaatccaaaaaaattagccaggcatgttggcttatgcctgtaatcccagcactttgggaggctgaggtgggcggatcacctgaggtcaggagttcgagaccagcctgacccacatggtgaaaccccatctctactaaaaacacaaaaattagccaggtgtggtggcgcgtgcctgtaatcccagctactcaggaggctgaggcaggggaatggcatgaacccgggaggtggagcttgcagtgagttgagatagcgccactacactacagcctgggtgacagagtgagactccgtctcaaaaaaaaaaaaaaaaaaaaagatacatttggctgaaatgttatatgatcctaacaaagtagtttcattctgcagctgtgacttttttttttcctgtaaagagtataagttttagtgttagtccaaagtttaagttgtttgtaatcagatttagtaaaatgtaaggccaatgagaaagagagtctttatcttaaaaatacttcccagattactacctataatttcactcttcaaagatctctttcaattagttttcaaaatagtttaatactagaaaacattaaaatttcactcatgtaaatgagtgaaattaatcaaaggaatcaacttcatgttacttttgaaattctatttctttctatattcagaataatgtaaaagttcaatgatccaccaaaatcaactccctttcttctttgcctctgttattgtacctttttctatttggttataatttccatggtatagcagaaataagaatggatcagaagttaaggggcatgattcatgaataaattaactgtaaaaaatgttttggatataagcagggaaatttggatattaagtgggaattagttgatattaagaaattgttgttacttttgttagctgtcataccagttcatggttatataaacaaatgtacttacatatattttagagatgcacactaaaggatttgtggtgaaatgccaggatgcctggaatttgctttaaaatactttagcgaagtattaaaaaattaagtgaagacaatgttattaattgttaaatctaaggaatggaaatataggtgttcactttacaagtctccctctgcttttatatatgtctgaaatttttcaaaataaaaaattaaacaaaaacaaaaccagaggtagatattctggtttctgatgcacactctgtagctttggatatatcacctaacccttctgattttcaatttttccagttttaaaattgaagaaaaaaagagccacctaactgtgaggatcagacagtctaattcttttttttttttttgaggcggagtgttgctcttgttgcccaggctggagtgcaatggcacaatcttggctcaccgcaacctctgcctcctgggttcaagcgattctctggcctcagcctcccgagtagctgggattacaggcatgctccaccaagcccgggtaattttgtatttttaatagagacggggttttgccatgttggtcaggctggtctcgaactcctgacctcaggtgatctgcccaccttggcctcccaacgtgctgagattacaggcatgagtcactgtgcccggcagagatggtctaattcatatgaaagaactctgaaaaaagtagaaagtgattttctaaaataaggtacaaataattaatgtaaacataatcacctaaccttgtggaatttttttttttttgagaagcaaattgcaaatttgtgatagatctaaaggagattgactaagagggtgaccatctggaaatgacgtcatgtgagaatggttaaagatgctcgggagattgagcctagagaaaggaagatttgtgaaagggttgggggagttggagcctgttcgttgttttgaaatatttcaagttatgaaaattcacctagtgtagtttcgggagacagaattgtgaccaatttatgagagaataaattagaaggtttggaatcagaatttggaagagcttcttaataaaaacttttgcaagatagaatttaagtgtcttgtaaaataaggtgatttccgtaattgaagttttccgaggaagctagtgaccaactgcagagccgtgctaaggtgtttctgtctttgacctcgaggttggatccagctgagccttgagaaacattccagctgtctgtggcttcatgagtccctgttgctccatatctttctacttttcattttatccagaacattactctctcgacattcttttcttctccctccggtctcctaattcctttctatttgaatttttaatcaacttttctatattttcaacattttagtcaattcagtggtatttattagattccacgaccacatttcctctttcagccccgcttcctctcctcagtatttattgtatttgtttcttcacattttgttaaacacatggttacaggatagaattaatttataataactattgagcattctttatgtgtcaggcaatatttttgggcactggagattcagcactgaacaaaataaaatatccttgctttcatgttgtttatattctagtggaaggtgacagaaaaatgaaatatatgctatgtatatgtgatgtatatattacacttatgataagtgctacaaagaaaaatacatgagagtgctgggaataggaagggcagaggaggggatgttctttatataggatagacaggaaggtcattctgattagatggcatttgagtagagatctgaagggagtaagagaacaaactttagatattggaggaaagaatcttccatatttagggaacaatgggggacaaagtcctcaggtgagaacgtattttggttgttccaggagcaccaaagcattcactgtggctggagtaggtaagcaaggaggaagtgtaggaaccgaagtcagagaaagtgtgtgtgtgtgtgtgtgtgtgtgtagggtgcagttgggtgctagaacacatagtgccttataagttcttggctttacttctagtgagatagggtgccacaggagggcttctaactgagatgtgacatgatccaaactgtattttaaatatattttctttcattcagatttactgctttgaaaagtggaagttaaacagaaatctaagtgtaaaactgtgaaggcaaatatataatctttggtttatttgaatcactattctttgagtccttctgatggggcaggcatagtgcctaattctaggagaaagatgtctgagccaggtacttgcctttgagatcatctgtctggtgtcttttcttctcagttctgttattattgaagcacacaataagcataacaatgacaatgacaaatcccctttgagagtcttgcacagttaatactgtgaagaatataaaaataggcctaacactttgggaggccgaggcaggtggattgctttagcttggcagtttgagaccagcctgggcaacatggcaaaaccccgtctttataaaaaatacaaaaattagttgggtgtggtggcgcacacctgtattcacagctactggggaggctgaagcaaaagaattgcttgaaccatgggaggcagaggttgcagtgagccgagatcatgccactgcattccagcctgggcaaaagactgagaccttgtctcaaaacaaacaaacaaacaaacaaacaaacaaactcaaccaagaatatagaaatatacaataagacccctcaaagaacttaaccatcattcacagcaagagacaaggaaagacatacagaaattaaaaatttacaaagcaacatcagtgatggaaaataaagaaagctaatctttcctgggacaggttagtctcagaaagactgttgctaagttaatctgtcactagctcaaaatgacagtctgtcagtggccactgtcaccacctatagtgtaggcagcttctgcgttcttttttcctgaagcattgctttgtctgtctctgaaattatgttaattgaaagtttgtaaatggaagagcttcagcattgtacagaaccaaatggctgatgacttgggaagttaagtgtaaagagctctgggatgtgagaagtagaaacaatgataacactaataattaatatgtattgagcactttctatgtgctagatacttttctaatcattatccttttttttttttttgagatggagtcccactctgtcacccaggctggagtgtagtggcgtgatctcagctcactgcagcctccgcctccggcgttcaagcgatcctcctgcctcagcctcctgagtagctgggattacaggcgcgtgccaccacacctggctaatttttgtatttttagtagagatagggttttaccatgtggatcaggctggtctcgaactccagacctcgtaatctgcctgcctcggcttcccaaagtgctgggattacaggcgtgagccaccacgcccggccagcattatccatttttaaactcgttttagtcttgcaaacttatgaggtactattactattcctatttcaccaagatggaggtcaataatctacacagatcatgttccaaactactataccaataaagtttatttataattttttttttgtttgtttgttttttgagacaaggtctcactctgttgcccaggctgtagtgcagtggcgtgatcatagctcattgcagcctcaatctccggggctcaagtgattctccacttcggcctcccaagaagttgggactacaggcatgcaccatcgtgcctggctaatttttttagtttttatttttagcagagacaaggtcttactgtgttgctcaggctggtcttggactgaactcaagcaatcctcccgcctctgcctcccaaagtgctggaatcatagacatgagccatcacgcctggcctacttatagtttttaagcacttttaaaatttttgtccaacaaatagatctgaatttggttctgaaagcttacaagtatcctagcaggggatcgaaggatgggtaaattagtgatgggtgacaaaaatctcaccttccatgacttaccttttggatggcaggctctatatggaagcggctataaaagtactcaagatatgtgagtatagaatttctttgtaaaaccacaattattgtcttttttttttttttttgagacacagtcttgctttctccaccaggctggagtacagtggtgcgatcttggctcactgcaaccctctgcctcctgggttcaagtgattctcatgcttcagcctcctgagtagctgggattacaggcacctgccaccacctccagataatttttgtgtttttagtagagactgggtttcgccatgttggccaggctggtctccaactcctgacctcaggtgatccacccgcctcggcctcccaaagtgctgatattacaggcgtgagccaccgcgcccggccttattaccttttttgacttggacatttttcggtctgattagtttggtttccttgcctgaagcagttacattcattattgttatgctctgaagaaattcctattctttaggcctagcctaccctgaaggtctattggctatgatgttttcagtggtacaagagaccctcaaatagctcatgtaatggatatggcttatagaattgaggtggtccttagaaaagatggcctctgcaacttattagctgtcttagtggccttgggcaagttattccatctttttataacagtttccccagctgtgaatgaaaataataatagaatctaactcatagtgttgttatgagtatgaatgaatattttaaaacacttggaacagtttattatacatagtgggcacaaagttaaaaaaataagttgaaaaatactatttactatattcataatcccccaaaccatgcattttctcttaaccaaaatgtcatgttagaatcatgtgactacatgtgtccacaatagcactttcacagagtttaaatcatttcatctttataagaccctctcaggtgagtaaagatgtattactctatgtttttctaacgagaaactgaggttcatggtgatttggtgagttacccctggtgactcatcttaagtggattaaaggtgaactaaagctaggacttgaacacacatctctagattccttctccagacttcttttttccatcattctgtactatttcttttcaggagttctgttcattcatggtgaggaatctatctaccgctatatgtgttggggtatgattaagatcatgcctgaactgtcttatgagagaaggtggtatgttccagcaatctacttttatctaatctttctgtatattttttgttttccccaaaatgatatattttaagctgtattttggtcatcccaaaaatcaagtaatggcaaaattaaagcaaacaaaaagaatgcattccagtggaggcaagctaagtaaatttttattcggctcaatcagacattgccacctagtggattacttctagatagcagagataagaaaagatttagaggaggcttgaagatataaatgaagaatgctgaaataaatagagaatgaagaaaggggagatttaagacatgggtctgtttaccactttagagtctctagtacccttttaacagctcatcactgaaatgttaccctaggatgtaaactccatgaaggtaaaaatttttctgttctgttgactactgtgtctccagaatctagaacagtacctgccacatagcaggaactcagtgaattaatgtgaaagttgatttcttatatttaaaataaaaagattatttacatttttcctttcactggaaatttttttataattcatatatgaaaacaagtttgtcagagttggttttcttttttgtgcgttatagttttgtaccctagctactattgtaaagttagtatgctaatattgtgtgaaacttaaaacaaatattttattttaaaattgtaatggtttatggaaatattttcatggctattttgttaagtttgcttgcctcttagaaatgagaaagctaatagacatattagtgaagtcaaatttagaagaaactacaaattttaaaaagtatcagggaatagttcattctttctttctttatttttatttatttattttgagacggagtttcactcttgttgcccaggctggagtgcagtggtgtgatctcggctcgctgcagcctccgcctcccttgttcaagcgattctcctgtctcagcctcccaagtagctgggattacaggcgtgtgccaccatgcctggctaattttttttttgtatttttagtagagacagggtttcgccatgttggccaggctggtctcaacctcctgacctcaggtgatcctcctgcctcagcctcccaaagtgctgggattacaggcttaagccaccatgcccggccagttcattctttaaaaatacaattttattttaaagttggacattcattaaaatgactcataattcaagaattgcaaaaaggcatactgtgaaaaatctccctccttatatctgtcttccagctacccaatgcccttcctggaagccaccaaggttatctttccatgtgttcttcctgagacttcttaggtgtttgcctgtttatgagctattactataagtagcaactatacaaattatacctattattctaaagaacaaaatttgatgtaaaacttagagttgtttcaacgatcataatatgctttcagttattaacaaaaatgtcagtcttttttgaatgaaaaataccatttggtatccctttgattatatttaaatgacagttcttattttagctttgtcagttgtttaagttagttttataataaatttgtatttgtatataaattattcacacagattcccagtatgttggttgacagttttactaggtcataaacttccaccatgtcatctcgcgtttccattgccttagtaatttgctgcaatcactacagcaaacaagaaaaacacaattacaggcattttactttcatatcaaatatttatttgcctagtaggccaattttggcttaatttcttaattttgctattaagaaaatggtaaaggaaagtcagatacgtattaatttgagaagccgttcttaaatactcttataagcctaaaactgtgctaggaactgtagaaatcacctaattaacttagaacatttgtgggacaaattctacctagggacacacaataaaaggagctagtgacattaaaaaatttggctctatctgaacacacacagagaagatctaattatttttaaaaaattacagacatgagatcactttcactgctgtacttggttataatgagaagtgatgttattagcatttttcagactctctcaaatgccagaggcattgtgtagaaaattagagtagccatcagtatcatgctgttgaataactgctgtaggattttatttagcatacaaacctctgaaccataactacaatgctagctcagtatttacatttttaaacaaaaagacccaaagtgaaggaatctattgcaaatctgtaaactcttttttgcatgaaaaaatataatttttagttgaggcagcttaaagctcattgatttgttcctgaggcatctattttctcttgatgaaagcacagccgaacagggattctcgtgtcaaagagtatgatttatttatgttctgaatcacagccgctaatgctcacatttctattaaaaacttaacatctatgggagaaagggacaaatactttcaagttcctcatgaggttgttgataagattctggcatttttaaagttgagaaaacacactgaaaaattgtgagaagagtttggctactttagcataaaagttactaaatgcacctttaagatgttcatattcttcctttatactgtactctattaaaatcatatgggtagaagaatagttaatatgagaaaatgttcatgttattttgttgcctaaaaaaggatattaaaaaagaacatttaactatatgaacctaattcggttaaaaagatttatatatcttttcataaaagatacagaaaagatatataggtatatatataaagatatataaatttatgtatttataaaagatatataaatatactacatataaaaagttatatattaaatatattatatataatatacatattaaaaagagtatgaactatatgaacctaattagttaaaaagatatattttttgtatatatacatatatcttttataaatatatctttatatatagatatataaataaaggtatgtaaatatatactaaatatatagaagctatatataattaaaaacatatttagtatatacatatatctctataaatatatctttatataaaaaggatatataaagatatataaaaggatataaatatgtaaatgtaaatatataaatatataaatatatagatatatataaatatatataaaaggatatataaagatatataaaaggatatataaagatatatttataaaaattatatgatctatacacatattgatatatagtacatatatatcttttaaaccatattacatatacatttacgtgtgtatattttttaatgtatgcatggggaaaaactgggaagctgtacatcaaaattttgtcagaagtttgctgtttgcctcagtttcttcatttaaaagttaacataataggacctacttcataaggttgttataaagattaaataaaataatacttataatatttataaaatgcttagaacaatagctggcacaaatgatagctattattgttgttttatttttatgtgtgtttgataaaacttgttttcttttgtttccttattttcctaattttctataatcaacattacttttgtaactgagttatttaaaaaatatattatctacttctaggattctttagttcccaagctctgttatccaaattttagaaggatagataggatcctatcattctcctttgcagcacaaactgatactgcaattaattaattatctgtttgagggttgtcttttccagtaagctgaaagctccactcagtggcgctgtgttgtcttcctgatttttgtttccttgtgcctaatgcttttcctgttccaagtcagtgctcaatatttgtcgagagaatgaaagttaagtttatgttcaaagcaattaatagtcactttgtatttgtgatttagttttatgttttatatctttaaatgatattatgcccattttgtagatgagaaaactgggcaaactcacaacaagcaaggggtgggtcaggatttgaacccaggtagtcttactaaagtgtactgccgcttatgagaaaaatgaggataaatgaccaaagcaatactatataaggaattacatcaataatataggacatatgtgaaatatttattgggattaaaaagatgaaagctaagagaaatgaaactgaatatgtggcacatctagcatgccttatggttgggtttgtgtgtgtacacatatcaaatgcttttcttataatttcgcaaataagtaagttttatttgtatcgactttagtcttatatttatttccttatctttttgtattcctttttcttcataaaatatattaagaaaaaaaattcctctataaattagtcctaacaatatcttttttagagggaggggagcttttaaactaactgcaatctaaagtattatcaacatgaagaagtgctaaatggaacttagttttacttgcccaacatataaatgattaaacttggtaaccatcaatcgcttgcttcttctctgaatatgaaagctgtggtgaacaaggtcttgcttccactctcactccatttttgcagcccttaatctttctttttctttctccagacttttgtgaacaggggcgtggcagagtctaaatatggtaatgaacctctcactctgaaaacagatttaagcaatgagatggggcttcaacagttagctaattcttcttatcctacatcatagatgctaatgtctcaaatgtaaaacttgaaaggcaagtgtattctctgtgagaactctcttgtaataaactgtaagttcttttgcttctttctttcctcctttctaccctccctccctgcctctctccatcccttctttctactgcttgcaaatatgggcagtgtcaataaacaatttactctgaagattgaacaattgctgaaaaaaattagagtggttggagaatcagattcctgttactgatctctttgctgttaattttctctgtggctgttgtgtgatagcggaggaagccttgactgtaagtcataaggtctggatttcagtcctaaactcaatttctgtatggttctgtctccttacctttaaaacagtcgcattagaaatctaaggatctgtttagctctaacgcttctaattttattatatattttactacagatgtgtgtgtgagtgtgtatacaagatgacaatgtcaagattaacagtgtttcacaaaaataatagtaaaatcgagcctacattgtttttcttctttcccctttaccttgttttgctgtaaacatttgggggagagggtaagggtagtgggaagagattactttgagagaatataatttagtttatcttctggcactcttgttaataatttttaattaagaaagcagagttggtattcagtaacaagctttatggatgcaaacttaatttgtatgacagatgtaatttagatgacctcagactaaacaaaatggagatggtttttggtggtccttaattacagaagcctgaggtctattttgcagaatttttcagtccattgaactaatatttatatccagcaaggactaaaaaacacatgtataaaggttatccacatagcaatcaggcattaaatcctttccccttactggacaagcctttcacttattgttccaggagggcctggcatgcatccatttattatggctttttcctaagtcataaatgatatattgtattagctgctttgtaccattctcttgtctatttgttcactatgatcttatccacagactatggtacatgtattttcatttccagttaataagcagaggaagtgaattttgcagttgacagaactgcctaacacaatattttctttaacttgggtaaattaaactatccattaattaggaatttttaaaaatgtaaacagcttacttctttgtgatcaggataataggaagttactattaataatgaatacatgtaatcattgctacagtacataaaagatatccgtaactccaagagtttaggagcttattaaccctaattttgtcttttatgtccatattctcctctgtcccaccccccttccccattgggacctctaaatgggtggatatctagggtttgatgagcaggctagttgtatgcacatgataattggtatgtgattccagggttaaagtttagcatagaaaaaaaatgaaaagattagcttgtttgcaatgaagagagctgaggcagataacagaataaatacatgacttgtagagaatgtaagagggaatgtgagagggagctaatcagtggactgaccttacctttaaggaaaattatctaattcaggtagctctccctctgagagttgattatcttttaggaaaaagtacctttctgaaaaaggcagtgtcatattgacagttgactttcttagaccaagagtgtgataggcaagaatttatatgagttattacaaaatatttaagcaactgtgtatcagttagaatgggctacgttgtgctgtagtaacaaatagcccctaaccttagttgcttacaatcacaaaggtgtatcttttcctcataccacatgtatcttgggttggcaggggctctgctccacattgtcctcatttgaggcagagcttccaccatctggaataatgctgcctggcctggcagtaggaataaacatgacaaaatatgttctgagtgtgaaagagttctccctagaagtgatgcatgttactttggctcacatttcattggccaaagcaagtgtaggaaagggctgtcccatcttgtgcccagaaggaggagaaccagaaatactggtgaattgcacctctcaaaaccaaaaagagtaaataatatttctgactaccatttagtatcaagattttaaaagtaataattaggtgaggaaaaatagacatagtgcctcattacaaaaattatttaataaatcgcagggtcagagctaccttttctgattggtaaccacaagcagtcattctaagaagcggacttgggaatgcatctgtacacatcagttggaggaaccttgacaaaaccgaaaagagtctattaattccacataatccctgcaaaaaaggcttatttcctttgtcactgggtaaaataattcaacacgagtacattgacagacacaggacaccacccctgccaagaattcagttcaacagactccagtttgaaaaatataaccatatagtctttatcatgagtgatggttgtcttataatgcccattttacacatgaggagccgaagctttaagacattatgtcacctttcccaagttacacagctcagaagtgacagagccttgcctagaacccatgttcctctgacatcaaagtgcatgctctcatccatatactctgctaccttgcaacaagactggcacagagaaatacctgaacccggggtggttcaggaaacagtgactgggagagagttagtgtagctgagtcagctggacccaggagaggaggcaatgatcttgtcactctgcaagtaatcatgctcataatcttagtagaacaaagaagttgtttttaaattagtgattttctgggctcaggttccagaaactcagttgcctttcctgaactttgagaggggtttgttgcctttcctcggctttgagaggggcttgttgagcgggagacaggaatatcccagaacacaaacaccagagcctttcgtggaaaggagcccatgtcaacagagtctgcatccccatgcctgcctgtggtggggtggaggatggggtcggctttcaggagctggagcactggggagtgagcaagctgtgatgctgttagcctgccgcctgtcctaagtgcagcccaagtcagagcagaggtgcagatggccagggcttgtgaggattcttgtaaattgaagactgtctataatttgattaaggcgcagacagctaacggatctttaaaggagtgtttaaatcaaatcaccaaacaaggaaggtggaatctggggagaattagaaggcaaacgtggtggtgttctcatcaatcagatgcagctgtccatgcactatttctaacttacaaataaattaagtttatacaggaaactgggagcatatcagatcagctaattttggaattcataagtgtaaaaatctaattttgcttaaaattaactactaaacagtgacaggtacaatgccaagttcttaggcagttgttttgaatccatatacaaccttatgaggtaggtatgataattctattttagaggtaagctgactgaaacctgaagagattatgtaatttccccaaagttataaagctagaaagtagtaatgttcttcaaacatgtgctttcttttaaaatgcacttccttaggtgattgtgctcagtggatcaattattcttttaagttgaagaataacagcttttcttaagatccctactcaacccatattttctagacaacctttgccagttaactctggtatgaagctgatgcagaaacaacaaatcagtatgattttctcttgcatgattcattcttgtgaatgggtattgcatgcttgttgggtccatattttcttcacataatattttattctctttgggggtaggaaccataactaaacagttatttaacccccattattcttaatgttatgcccttcaatgaatagctgattttatgaagcgtagttactttatgattaggctttttatgtcgctcattaagagatgacttatgaccaaaattttaatggaaatctttgctttgggatcctgctatcacctaaggtgcttacaatttgttctgagttatgctacaaaatgactacaattatttacctatatttccataagcttaaagtttggaaaagcgaagcatgcaggcatctggaccaaagctgcagagagaagatgactgaaatttgcacaaatgaaacttacaagtgtattgttttcagaccattagaaggtatatatttaatatagatatatataatagagtttagaacattaatatataaaatgaaaataagtgggtgcagtttctagtaactacccagagagctagggggaagcagcagaaagcatgcagggcaaagactgttccttaggcttgagttcacagccaggtgtttcactaatagctgtgttaccttcagcaatttatataatcactttgaaacttacttaaaaatatttactacatgttgtatgtcatttgtaactgcagtgttcttctttggatgaaatgtgtgttaaacatctagacctaagcatgcatgcagtgaacaatgattactattattactactgaagcccaacacaggctgttttgatgtcagtgaatacagtgcagatgtcatcttttccgtatttctggagaacagattttggcaaataggagaaccttaagatattcattaacctatgacaagatttaaaatatttcgttctacttagtgctctgagcactcttccctccttgacccctgccattttgtaatatgcgcttcctaatgtatacatgcaaacccacaattatcactttcttcatttttctgttcaaattagaaatcagagtagggaaagatgggagatggacaaaagtgtttgtaggttgtgggtaatttctcgcagaggatcaggtctgtgccatctgtcatggatacctgggcattagcagtctgtaaggctgcttgaggggctggcagctgccttgcctatttacaaaaaaaacagcactttggagaagccatatgtatatatatgattccaagttatatcttgaacatgtctgctttctacatatcattcatttgtgagagttgatataacattttaactgtttggattaaagttgaacatgttttttttttatgtttggataatgaaaagtaacagaaattggtaattaaagctgggtgggccctgatgaaggaagagacagacagatcaatgagccagaacagaatccggaaggaaattcaattacatcataaatgagtaactgccctgattcaatgaaggggttgcacacagaaaactttttattttccctcaacatttcattcaaacaagctctgccatctctttttcctggccctggctatcatctcaagtcatcttatagcttttaaatccctgtttttggtaatcaaatggtctcattttcagatattaaaaagtctaggccatatatatcaaaacgttattgttatatgcagtttaatggctttgtctcctttcagctcaggtctgacctatgattgcctctgccccatattctccttgtttttagatgtttagactttctatggttgagggaatgaggctagtgagtagagagatagaggcaaaggcattttcacctattgcttttggtgctttcctggctatcaaatgtcctcttcatctcaggccttcagatgctgcctcttctctgatgccactggagttctttgaagatctcccctgggatttctcctattaactttcagagtccccctcacccctgagcttttaccctaggaggtacagctccagccatttactgttggggtccttttgcaccagcaggcagcagtgttcttgggctgtgcctgtcaagtgaagatgacataagcctagatatctgcttgaattgtttcgctgatttcatcttgaaagaaggggctggtatctctccaggtaagtaaaacttgcaaacatctccaaagtggttcacttggtcccttcttttcctgcatggcttcacttaggaaaaacaccaataaagcattctcttcctaaaattttctgtaaataaactgtcctcttaaggagtctataagcttttctaatatgggataggtgtttagaatatgttcagtagctgggttttgtaatcttttaattgctgtggagatgatggatctattgattatttttggaactaatgtggatgctactgacttgttaactcagtttggggcctcagcttaaattctgagccaacacaaaagagtttaattccacattctttttcaaatgtaatcaaacatgttggggaaatatctctgtaaatgacattggaatatcttgctaaccatttagaacaaaaataattgatctctatttgggtaccacacacaaaaataaatctgagatggattaaagattaaaatgacaaaactgctagtaaaacaagatattgtcatcttggtctggaataagcctttctaaatttgatgccaaaggtaagaaacaaacaggaaaaagaatgcccaattagcattcgtaacaattaaaaagtttcacatggcatgcacacaacacaaaagacaaattttatagtggagaaataatttgcaaaaagggttactattctcaatatataatgagatatcattaagaaaaatataaatatgagaaaaatgaaggaatttagaagtaggcaactcaaaagagaagaaatgcagttgatcaataaacataattagatgttcagtcttgcaaataattcacttttttggtctgcttggaatgctttccccttttcttcacaatttttgtaaacctgattccttttcacaagggtcttcagtctaatgtccctcatctctgtaactccatgcttcacttcttacctgcctctctctatttgaatataagctttttgaggtcagatacctaatctatgccttttttcccccagtgcctatttagtgcttggccatagtagactctcaaatgtttgttgagtaaatgtgtaaataaatgaaggaactgatagaacgtaaatggaaacaattacatacagtattttcctattgtattaagaaaggttaaaaagtaaggctgggtgcggtggctcacgcccgtaatcccagcactttgggaggctgaggtgggcggatcatgaggtcaggagatcgagaccatcctggctaacacagtgaaaccctgtctctactaaaaatacaaaaaattagcctggcatggtggcatgcacctgtagccccagctactcaggaggctgaggcaggagaatcacttgaacctgggaggtggaggttgcagtgagccgagatcatgccactgcactccagcctgggtgacagagcgagactctgtctcaaaaagaaaaaaaaaaaaaagaaaaaaagaaaggttaaaaaataaaaatacctagcatgagtgaaataacgtattatcattcttggaggtaaaaattagcacagtatttcggtaggaaaatttggcaagttgaatcaaattttaaaatgtgtgcctcggccgggcgcggtggctcacgcctgtaatcccagcactttgggaggccgaagcgggcggatcacgaggtcaggagatcgagaccatcccggctaaaacggtgaaaccccgtctctactaaaaatacaaaaaattagccgggcgtagtggcgggcgcctgtagtcccagctacttgggaggctgaggcaggagaatggcgtgaacccgggaggcggagcttgcagtgagccgagatcccgccactgcactccagcctgggcgacagagcgagcctccgtctcaaaaaaaaaaaaaaaaaaaaaaaaatgtgtgcctctttgacagtaatttaatgcttggaagtttatcctaagaaaattactgaactaatgtacagagatacatttggttgtgtaacaaagtattgtttatgatagggaaaaattactagcaaatgagatgttcattgataatcaggaaattgatattttgtaaaacattcaaacaaatgaatatacttagttgttaaaaatgatgttatagatctgtgtttattgacataaaaaggtatttgtgatataggagaaaaaaattatactgagcaggagttattttgataactagctggtataaaaaaggtttttaaaaagatcataatttccttttccagtgttatttaatgattcaaatgaaaagaaaacagttgaagtaatttctttgtaaattccttttccttctaatttgtttttctgattattttcttcattcttgttactgccacctagtggatgatgattggtttgcttttttattgttcgagattatggtttattttttccccgaaggtagctctttctaagggtttaaaaaaaaaatcaccagtggtgtgctagtaaacattttacttccagctatccaaaggcattgtgtacataagtatacattcataaacttctaataagctttacttataaaggatgcacacaatttatgtagagggagcacatattttacgagtaataagaaaacagaaaatactctttatttaaattataaatagctaattgattataacaaattgctttcattgctttttgctgaactcctgtatctgtagcaaacctgtggctgcagttcaaccatgatttgacacatggagctgtatgccaatttattaaccctttaccaaatatcattaaatctgacgtgtgatgtaccattggactatttctcaccattgtacaaattatcttcattgaactcaaatctctttcagctttagcactaaaccaaacccttctttatagtgcttgtaactttatgttatgcaaatattcccactaacgttgatgtcaatctaccaatgtgaaaacacagaacctggatttggggacagatgcacagtagcactccattatgtagtattttcactttgcatatgtgatagacataatagcttcaaagcatagataacggtaaaatgtagtaaatgtagtaaaataaatagggagtgatgtttaaaatgtatatttcactatttttaatataacttgtttgactataagtttatataacttaactattaaaactggcttgcaaaattgaaaatttaacagttggctttcacaatcttgcatgagcaaatgccacaccactgaatatagctgttatctttgctttttgagttgtctttattgttctggggaagctgcagagccatgaaagagaccattctttgagctctaatttgtatctgagcagcatattatgacatgttttattgttatctgtcgttggtacatgttaaggaagagtaataccatgatgtaatcctactcttccttaacatgtgtgttttaagcctttgagcatctttttaaataaaaggatgaacatgtgaaatatatatgcaaagttctaaattattgagcaaaattattatcatacaattacttcaactaaaatatctcttagagatacttttataaaataatccagaaggatttaccttttaatatgcttcctcatattgtctcatctgaccctcctacaaatctgtaaggggcatattattattttcatcttacaggttaggaaatggggaaacagagaggtaaagtgacttgaccaagtcaagagagattaggagattatattagtaatgataataacagcagcaacagcatcactacagaaattgttgacaaagtacccaggatatgccaagcactattctaaatacactgcggttattgtttcatttaatcccatgaaacataccataaatctccacttttcaagtaagaaacccagaccagagaggtagagcaatttgctcaaggttacataagtggggacactggggttcaaagccagatatatctgattccagaacttaactcccagaggcactataatctcctgcctctcattattaatctggatttccactatattctgcattcacagatgcaggtctagaaatgcagtttaagtttatccattgtttaggcaagcataatttatagcttgaatattgtaaaaataattattcatgtttctattttgcatagttctagaaggaaataaagttctgttttaaggtgtttgcttctgtgcaagatgcacaggccagagtctcttatgacattcgaagtagggagatgttaatgatgaggacagccctgcctattgttcccaagtctccagagacttccaaggcttccagtccttacacaattgttgggagaatcccattacttgtttgtggagaggattacatacgtttggtttgcattaattgcagagctttgccgttagcattactcatatgagactctttcagatagttattaatttccatttaaggaaattaaacttttgacattctctagaggtctaattattgactggctgtttcctgactctactctggcagaggtagttcttttgccttgtcggcactaaatcttgactcctgaattttgacgaggattattaccaggtgcttggtggtttaataagcatctcatatatggtgaaaataaacaaaccagtcatagagattttattgacattgtgcaaaaatcccagtttttcagttttttaggcagttgaagtcacataaacagattatttatttatttatttcttctctgtctccccccgcccccgtctttctttcttataaatgtaaaggcagaaaaaaaagaatttagaatatatgatagactggtactttatagactcagaaaaatgcagaactatttctattttaaactcaaacaagattttagtacctaatggtcatcactgtgtgaacaatttaatccctttttcatagaattaaatttgccagtggatattgttgtcccacccctgtatccttccctttcttcttcctttgtcccttcatttctcctcccctcccctcccatccctccctccctcccttccttccttccttccttgcttccttcctaccttccttccttccttttcaataacatgtcagtcctggtattagttccctctacagagttagcagggcaaaaagctctttcattaagttattttctgaaccaaggcaagatgttatttggactctatttataccatttactgtttgtggaaacaatgagataagtatttaatgaaaaggattgtgcagcagaaatgtgacagctcatatccattacatagttcgagtataagcacactactacaaactctaaattgttagacagatggtggcttttgggcttcattcaacagaaaatagcactaattctctaaactagcaattcctgggttttactactcattgatttcttaatagatttaattttatttcaccattaaccaacacttatttctaaataaataagaatagcaaaatataaatatattctttgacaaggtctttttaaattagaaaagttttggttttagaaatggcaaagttcagagaattatctggtagtctctccattttgtagtaatcatcatacagtattataaatggagtttgcttgctgatataagtgtaaactggaataatacttttggaaaataatttggaaatatatattaaaagcatgaaaaaatatacaggcaataatcaacatctatgaatcagttatagggaaataatgccaaatttgtaaaaaactgcatgaccaaatatgtttgttattgtaaaatatgtacatctttggcaagaggtgtacagttagagtaactatgcccacattacaactatgttaacaagaggcaataaaatggaaatgacaatgtaagtgaaaaataggatgaaaattattctttgatataaatcacataaagttcatgaaaaacaagctacagcttaaactatttgtggaagaaaatattcaatatgctaatagttgctgtgatctacatactttttatcttttttaatttaaaaaggtcaattattacttttataataaaaatatgaaaaataataagtgacattgcagaccaaaaactagacatcaaagtaacctaggcctaaggattgcaaaaatcatcttttacttctagtataattaaagattatgctcgaggcaaaagtgttaatagtgaaaagactagaacttttgagattatatagtctaaatttccatttggcatgtagatatgagagcgttaatagtaatgaagactaacaccttagccttttaattctcagttcaaaatcttttaaaccataaaacattttattgtttaaaaaaggttgtttttttttttaaatgaatgtgaatttattgtggacttgattgcttaaagaactgtcagtttacacccgggtattcagaaagcctaatatgatgggattctagtctacagtgtcatgaatgttacttattgaaaacaaatatgctatatgttgtaatatgccaggaataataaaatgttatgcatataattaccaatatttatgtgctaatctttgataattagtagggttagggagagaaggtaaaatgaaggattagtatccctattttggaagcttgtatggatgtcatcttgttttctaaacaaattttcttatagcaagtatagggattcatttattcacttatttaatgcgtgcttatcaatcacctactatgtgccagttactgtgcttactgccaggaagtaatggtaaccaaaaccacaaaaatcattaaagtaatttcttttctgctcttgcccctgaggtgagacatcacattttatacagtagtcccctctgattcttgggaatatatttcaagatccccaggggatgcctgaaacctcagatagtaccaaccaattgccatctacctgtgcaaacagagcacatttctgtttgccttttacctacaaatttaatgtcttctacctacaaatttaatgtctttttcatcttaactaagcacttatcatgcactatggctgtaagtttttgcaggttgaggtacgacagcacaactagcacaaatttcattttccttcttcacaattccatggatagaacatttatagatcttagcaatctcagcatatgatttttttttccttctttaagttgagaactttcaccttttcacttaaaggaagcactctacagcttctctttgtcacacctgaattgccagcatcactacgcttgtgctttgtggtcgctattaggtaaaataagtgtgacttgaaaagaagcactgccacatccaacagtcgatctgataatggagaaggcttctaagtgactagtgggcgggcagcatagacagcgtggatctgctggacaaaaggataattcatgtcctaagcagcatgagatttcatcacactactcaaaatggcacgcagtttaaaacttatgaattatttatttctttccacttaatgttttcagaacttgattgattgatggtaataaatcacagaagtgaaacttcggataagggagaccactgtaaatattgggcatccctaaaagattcgttagaaatgatccctaagtcactagtccctggggtcctgatgcagaaactgaaactgaatgaagagaatgaagtgggtaaagatgttaagtgttctgggtattaattcaacttaatgtaaggttagggaggtaggcactacctctactatgtattatatgatttttttattgacgttgtctcttaaattattgtatcctctaaattatctgcactattgctcttgtttttttttttttttttttttttttaattgatcattcttgggtgtttctcgcagagggggatttggcagggtcataggacaatagtggagggaaggtcagcagataaacaagtgaacaaaggtctctggttttcctaggcagaggaccctgcggccttccgcagtgtttgtgtccctgggtacttgagattagggagtggtgatgactcttaacgagcatgctgccttcaagcatctgtttaacaaagcacatcttgcaccacccttaatccatttaaccctgagtggacacagcacatgtttcagagagcacagggttaggggtaagatcacagatcaacaggatcacaaggcagaagaatttttcttagtacagaacaaaatgaaaagtctcccatgtctacttctttctacacatacacagcaaccatccgatttctcaatcttttccccgcctttcccccctttctattccacaaaaccaccattgtcatcatggcccgttctcaatgagctgttgggtacacctcccagacggggtggtggccgggcagaagggctcctcacttcccagtaggggcggccgggcagaggcgcccctcacctcccggacggggcggctggccgggcggggggctgacccccccacctccctcccggacggggcggctggctgggcggggggctgacccccccacctccctcccggacggggtggctgccgggcggagacgctcctcacttcccagacggggtggctgccgggcggaggggctcctcacttctcagacggggcggctgccgggcggaggggctcctcacttctcagacggggcggttgccaggcagagggtctcctcacttctcagacggggcagccgggcagagatgctcctcacctcccagacggggtcgcggccaggtagaggcgctcctcacatcccagacggggcggcggggcagaggcgctccccacgtctcagacgatgggcggcggggcagagacgctcctcacttcctagatgggttggtggccgggaagaggcgctcctcacttcctagatgggatggcggccgggcagagacgctcctcactttccagactgggcagccaggcagaggggctcctcacgtcccagacgatgggcggccaggcagagaggctcctcacttcccagacggggtggcggccgggcagaggctgcaatctcggcactttggaggccaaggcaggcggctgggaggtggaggttgtagcgagccgagatcacgccattgcactccagcctgggcaccattgagcactgagtgaaccagactccatctgcaatcccggcacctcgggaggccgaggctggcggatcactcgcggttaggagctggagaccagcccggccaacacagcgaaaccccatctccaccaaaaaaatacgaaaaacagccaggcgtggcggcgtgcgcctgcaatcgcaggcactcggcaggctgaggcaggagaatcaggcagggaggctgcagcgagccgagatggcagcagtacagtccagcttcggctcggcatcagagggagaccttggaaagagagggagagggagaccgtggggagagggagaggggggagagggagagggagagggagagggctgctcttgttttaaagatttaatactgcatgttaatcaattttttgttaccctttttgagttgactctacctgaataccatgttatgatgcattattaagatatggaccaaatgtttattccttctcaatgataatgattgtcttttgaaatttgaaatcttaaaaaaatctattttgggggtacaagagaagatttctttttctttttttttggtgatgaagccttgctcttatcccccaggctggagtgcgatggcatgatcttggctcactgcaacttccgcctcctgggttccagcaattctcctgcctcagcctcctgagtagctgggattacaggtgcccgccaccacgcccggctgattttttgtatttttagtagaggcggggtttcaccatgttggccaggctggtcttgaactcctgacctcaggtgatccgcccgcctcggcctcccaaagtgctgggattacacacgtgagccaccgcgcctggccaacagcagatttattatatgcttatattgggtagtggcataaagtctgggcttttagtgtactcatcactggaatagtgaacattgtatccaatagataagacaggttatcttgttggggaaaaaaaaagattgaaaatgcagagtggaaccttaacccttaatgaagcagattttttttgaaaacaagaacaaaaacaaaacaggctccattataaggtgtgttattttctgaatgaagcagtgcctgctttcttcctctctcccgcagataaaagggtgctccttgggctttaaaaattattttaaaatttgtgatgctttaatcaatgtttgcctaattgaattgatgtaaagattaaaaagtgaaggtttgggaactttgtgaataggttatgggaaacactcacatgtgataggtaggtatataatataatagtttattttacttgagatactctcttcctgtattataactgccttttatgaccagaattcctaccttaaatgtattgatgtgtaggaatatatgtatactcaaattttcatgtttataaatagtggtgcttctatggaagtcttggcagtaagattaaagagtggaagtacaagaaatgtgagctaatagaccttaagaagattgagagaattgtcaagcccagctccagacacttgttgggcccatgaggagtatttttttgtcagccaaatttgagaaactcccttcttgaaatctgcctcggaactgtccacaatgacaaaacgctcctgcaatccagaggccaaggcttagcctaattgaatgttaagcagctgaaagagtttgaaaccagaaaaagtgtacatagtggaaatcctgatgagcccatcattgtggtggtctcctgtggtggcaatgataataataataatttatttaaaatagccaaggtagagacaaaagtttttgtgtattcaagccaaacaactcagatgaatggcaccccccagactaacttctgagtaaaccatactgtgataacgtaaagcccatctgtgtcaggaatatcgggaggtgccattaggctggaggacctgcatatattcatatattgtccacaaccttcttttggggtctggttgtctagatgggatgactctagatgacatgtatgcagggtggattctaaaccagaggtagagcagcattagtgtctgcctttttttttttttaaatcttgtggtacctaatttccaaagccactcaaaatgacaaacataagtgatctgattattataccagacgcatataaaaagtttctatttccttacaaagtttttctggctctcaaatgtaatcgctgttttgtttttctgttgctgtttgttttaaagaatcagaacaagaacttcccttattttaaaataaactattagtctccgacttcaggcacatcacaatgtcccaaattagattgtatttaattcaagacgaaaattaaattgagttaaaatagatgaactctgctttcttaataaatttattctttaaaatgataaattagtgataatccttaacattaactattttattttaccatcattttcctcaactacagcgttttcatagtaataagataatttattttatatattggcttgtcaagtttcctcatctgcctttcccctttttaccttcatgacatccctatgaggatattgagagatagcatcattactccaattttacagataaaacccaggtttagaagagttatttgttttttcataaggcttgaatcagatactttacaaataatcagacttgtaaggtatttacagtactcaatttccatgtcattcttgtgtagcaattttagtttttaaactatattaaaaattctttagtttttgtaaactatctaaataactgttttttttttttttgaaactggtgggcttaatagagacaaataggttacagacaaaattccattataaaaatatcactgcagaagagctcaataagaaaagctatttccttgtccgggtggacagcctatagaaagtgtctgatctagctgcagtgatttctgtgggaagaaagcatctctggattaagaaaaatatcagtgtaacaataacaacataactattgaatgctactctcattataggtaggaaaaggagaatataaggtattttttttagttatgtgtagagtaacaattatttattgtttctatctcagaaataactactaaagagaacctttctttatttcaaaattgcccaaacaaagctacataaataaagattctgaatataggacagaatatttttctgaaagaaaaagtgtgtgtttaataaattcctcatttctttaatgtgttttaaataccttagattaaaatatactacagaccaggacttgactttaacgtgcataccatgggtggagaataccatttgctttttgcagattatgacttatatgaacagaataaaagcatgctacatttcccccattgtgtttagggctgttggaccatgtgtcaatggtccacttttagttagcagttttctctccctttaaattattgtgttgaagatcttcagatgaaaattgctaatatgactataatgaccagagctgagtttgtgagaagtcaaaataattacagtggttctcaaccctgtctgcccattataatgacttgaaaacctctaaaatataatgatacttggattccaaagattctaatttaatttgtttgattctaatttgatttgtttaatttgtttgggatggggcctgggcctaggaatttttccaagtttccaaaggatctacaatgtgcagccagagttaagaatctctaatctagtctgtggtcttcaaactttggttacttttagagaatgggaatttatttgtttctattaatttttgtctttgtttttccaacttttattttagataacacatgcaggtttgttatgtggatatattgcactcagctgtgaggatagtactcaattggttaatttttcaacccatacttccctctctctaccctctagtagtctgcagtgtctattgttcccgtgtctatgtccatgagtagtcaatgtttagctctcacttataagtgagaacatgcagtagttgattttctttgcctatgctgattcacttaggattatgggctccatctccatccatgttgctacaagggacatgatgttattctttttatatctgtgaagtattccatggtgtatatgtaccacattttctttatccaatccactgttgatggccacctaggttgactccatatctttgctattgtgaatagtgcagccatgaacataaaagtgcatgtatctttttggtatactgatctattttcctttgggtatgtacccagtaatgggattgctgggttgaatattagctctgttttaagtccttttagaaatctccaaactgctctctacagtgtctaaactaatccatattcccactaacagcgcataagtgttcaatgggaatttattaagaaaacatatgcttaagccctaccaccaagcctaataagtcagaagctatagggagaggactttagtatctgtgtttttaaaagcttttaagaatcactgacttatggcaagagtagaatgacatgatttcattaaaccttaattagagttaaattttggtatggagccattcagctgtataagggaaattattttctctgggaatctccagtagattcctgctaatcatttgtgtgatcaagtgttatatttatttatatctcagattttttcagctaatacatgaatatttactgattatatactttttccatcacttaatttttgaaatactgcttaatagtcaattatttagaagaaatatttaaatagatggtgacatgttcctttagattcagttagttctgaccccattgtcgtggtgatatggttcagccttctaagtgatttcaagcttttcccttctctgaaagcaatatgagaatgtattttgatataattctttctctttcaaagccaagtgtgtttccaaatacttgttggtttttcttggttgactcttaatttttaatgatcttgatgatactaaagccatttacacctttagagcttaataatgtacaaggcaaaaacattcttttctgggaactcaatctgtttcatgcatctattattgcctaccaacctctaatagtcaaaacagcatagcatcaaaggtaattacagctcttaggttgagtgggtttggtaagattacttagattgtagtcattcttgaaattacagaaataatttattggttcaaaattttgataagtaaaaataatccatggaccacagtagagtagctcttggacagtagcacgtgtcttgagaaggggcagactgaattttttttccaagtgaatcactatttctcttcatgatatttttcagtcttgatgggtgcttctataaaatgggaataataaagcatttgctaaattcttacatagttccttcagggaaaaatataggttataataatattgataaaatataaacgctgaaccaagtctctataaaatgtaattatttgtaagaatgagacaattataattcaaaacatctaacattattttgaaacacaaagtggaaatttaataaaaataacaccaacatactaagagaatttatttctattatttacggtagccaactatttatagttactgagtcctgtagccacttccatgattgtatatagtcatacattatgttaatggttacattttattattatttgactatatccctattattgaattcttatgttatttataataaaacatgactttttcaatttttaccaccctattatttccagatgatatttcctttttaaaatttttaaggttttaaaattttttgtgggtacataggtggtgtgtacatttatggggcacacgagatactttgatacaggcatgcagtaagcaataatcacatcatgaaaagtgaggcatctatcccctcaagcgtttatcctttgtgtcacaaacaatccaaatatactcttttagttctttaaaaatatacaattaaattattttttgtacccattaaccatccccacttcccccaccctcacccccactacccttcccagctgctggtaacaattcttctactctctgtctccatgagttccactgttttgatttttaacatccacaaataagtgagcacctgaaaagtttgtctttctgtgtatgacatttcacttagcataatgacctccagttccatccaggttgttgcaaatgactgaatctcattcttttttatggctgcgtagtactcctttttgtatatgtaccacattttcttttcttttttctttttttttttttttgagacagagtctcgctctgttgcccaggctggagtgcagtggcacatctcagctcactgcaacctccaccttccaggttcacgccattctcctgcctcagcctaccgagtagctgggactacaggcgcccgccaccacgcctggctaattttttgtatttttagtagagacggggtttcactgtgttagccaggatggtctcgatctcatgacctcgtgatctgcctgcctcagcctcccaaagtgctggtattacaggcgtgagccaccgcgcccggccatgtaccacattttctttgtccattaatctgttgattgacacttaggttgcttccaaatcttggctattgtgaacagtaccgtaacaaacaccagagagcagatatctcttcaatacactgatttcctttctttgggggtatatacccagcagtggggttgctggatcatatggtaactctagttttaattttttgaggaacctccaaactattttccatagtgattatacaaatttacatttttgtcaatagtatattaagattcccttttctccacatccttgctagcgtttgtcattgcctctcttttggataaaaaccattttaacctgggtgagagtatatctcattgtagtttcgatttgcatttctctgatgatcaatgatgttgcacaccttttcatatgcctgtttgccatttgtatgtcttcttttgagaaatgtctattcaattattttgtctattttaaaatcagatgattagatttttttttcctatagagttgtttgagctccttgtatattctggttattaatctcttgtaaggtaagtagtttgcaaatattttctcccgtcctgtggattgtctcttcactttgttgattgtttttaacttgacgtgattccatttggttgcctgtatttgtggggcattagtcaaaaaattttgctcagaccaatgtcctggaaagtttctccagtgttttcttatagtagttttgtagtatgaggtctgagatttaagcctttaatctactttgaattgattttcatatatggtgagagatagggatcaagtttcattcttctgcatattgatatccagttttcccagcaacatttattaaagagactgtcatttctttaatatatgttcttggcacctttgttgaaaatgaattcactgtaggtgtatgaatttgtttttgggttctctattctcgatgatatttcgaatcacattctgattggttataatattctggttatagcaaacaatgtaattctatattctaactattttatgtattttatattataagaatacttattgcctgattttataaaattataaaataattttttaatagaaacaaatgttgcaagacataaaagtattttaatgatacttttaaatttagaaaaacttaatttaacatatttaaataaggctatattttcacattgttaggtgtagaactttaaaaaatctaaatctataaacatcttcaattataataatttaacaatctgcatcaattaggattcaaactacttcagaaagaaactatgacatgtttccttttctttgtgaacatttatactataaatccaaattacattataaatgtttgattaaattgatatcttctaacactcgtaaaagattatatctcattaaaaaattgaaatatactaaaataattcttgtttatgcaattcgagcataactcttttaatatatatatttttcattataaaagtaattcataatactagcagaacatttagaaaattatttgcattaatcatggtaaatactgttaatgttttgtttttctttccagttcttttcaaatgagtaagtgtgtgtgtgtgtatacacatactttttaaaagcaatttaaaatcatatataaaaattaatcttttaacttaattctataataagagtttcttcacgtttgtaactgttctcagaaagtattcctttatcagtgtcacttttttttccattttaagtagtgttatggtgaacatttttgtacctagaatagatttttagagaattaaaggtgtctatatttagatatcacaaccataatcatatgtaagatcatggatatagaaaagatattctatataagcctttttaaaacctattaggaagttgttttaaatgttaaaaaaatcttgatctatgatgtttgattgacaatgcataaaatgctgttaaatcttattaaatatggtattactccttctgaccctctcctttcagaatggtcaaatctcattttcagcttgagcgagcactgtcaataaatgtaagaaagcttgatgagggccttggggggagcatgtcaagcaaattgctggttcctttggtataagagtgattttggggtgtccttaggacacattaagcagttcagagtagtaggagaaaatatattctctatagagaatttagaaattttctcagttgatcccttgatgaaataaatccttattaatttttaatcctgaaatatgatggtgttgtactgagttccaagtaaagaagtaaatgtagtgtcatctgcaccattgaggagggtgcgatttgtgagactgtgtatatgatcttggctcccccttggcaggcataaagactggattagctcttgtgccttcctggggctggaagccaaaagtcaagattaaactaatctaaatctttccttttacaagtgagcaaaatgatgctgaaggaagttaaactactttcccaagttacataatcatgtgccagagctgaaacttgcagcggcagagcccagcgtaataaccttttccctcaccaccatttagtttagagcttcagaagtatttttccattgttcgataatcaaaatagtaacttaaatgataaaaatggcccattgttatctggcttttatcttttaaaaaaatctgtgaaaagggttactgaaatgatgtatacttttccaaaggtgtgaaaacaaagttatcagaggtgtagcaaaaatttgtagtaagtcaaaagcgttaaatgattgaatgtcttctttaaaaaaatcctgtcaaatccgtatatttttgatgttatatcagtttttattttagctggatccttcatttttagctctttaatcacactcagacagatcttgaatgcaaaattgttagtgtgggtggcagaaacagagagatagcagcttgcttattttaatatttaatcatttcccctctcagcttgagttgaaaagacaaaaagcctgtgaatatatcaaggaagactgtggaatccatcgtccttcataaagaaaaatctcctgattgacccatttcatataccatacagacatcttttttcctggtatttgatagttgattacttccactagttggtaaaattagatgatttttatgttttttcccccaacctctcaccttttttattccagggagatttgcccaatcatggaatgtgtaactttcagaagcattgaactttttttcaattgcttattcatttgaaggactttccaatgaaccattaattattagcaggttagtataattcttgaactgagatctgtattacttactgcacagggttcaaagaggtggtggtaccgctgaataatgttcagatgcattgatcttcgcagccacagactttctttcagatgttgggtctctggctcggacatctgtcactccccatggaccaggcccgtccaaccagctggacagtgccatttcccatctcatctcacctatgccacacccttggctgaagatgatggccatcccagagaaaagagccagtctttggttgaagaatgaattgttcatggaactctgggccagattttttcttccagttgtctctggtaaatttatcctgccaccaaaattaagaataaaggggtgaggatgtagggtttttgcaaaggcacattccctgtagaatcattgctttttgtttttttttctctttctcccttctcttttcccacattgtgactgctgttgcccatagcaaccaccattataacattcacagcagcttttactacaatgtgagggaatcccaaattagaaattatttgccatttctatatagggacacaattcttcattatttaatgaacttagcatagggttaaatcattgaacagtctgttctggagaatttaatatttttacttgccctatagttgttcatttctctacttatactgattttattgattgtttataccattttaatttggtaatagatccctagagaaacaaggtctttttgtgtcttggcctcagattcatccccaaagtctcagttcagagtgactcacttccttactaaaaattacacatcagaattattcagctagccctgtgtatagtccagtaactatgctgagggccttgtatatgttgtctaatcctcaacataattttgcaaggtagatgttattacctatattctactgatgagaacactgaggttctaggaggtattttccaaaggctttatttatagttaatgaatgatggtatctaaacccttcagaccctaggcactggagctctttttgaatccacactaactctgttaataagaattacttgcagttccacttagttttaaagcccatagatattccctgaacactctttttcctggatttgcaacatctcgtttctcttgaggaagagtctgccatttgctgactacctatctacaggcattcatgtaggttggcctagtccgcaattttcccttacttccaaatttctctctttagtttttatcttccgccttcctctctgatttatgccattggcttccccccggactttaatgttgacaccttttgctgcttctacaagttcagactctccagggaaggcttaaagaaaatgaagactagggaggaaaagagtgaaaagggggaagaggtggttgtgttctgagcttgagaccaatgctccgaagtggcagaataggaattggatagcatggaggagaaaaactcaagcaaaccatatctagccagtttttcaaaatattttaggatatcttgtttatagaatattcattcttacatctaacccaaatttgtgctgtagagtgagccaatatcttcttgttctgtccgtggtagatatggataacagttattcagcaatctccttttatatttgataatatgtattatattttctcatatgtaagctgagctctgtaggagtactttagtctcactagtgaaaagcatgaaaagactaatatctaattccaaacagtttttgatgcaggcccctgtcatatatattgttttatgtaacaatactgttaatctagagacatataattttattattttttttttttgagacggagtctcactctgtcgtccaggctggagtgcgatggtgctatctcggctcactgcaaccgccgcctcccaggttcaagcaattctcctacctcagcctcccaagtagctgggattacaggcgcctgccaccacaccagtttaatttttttgtatttttagtagagacggggtttcaccatgttggccaggctgatctcgaactctgcctgcctcggcctcccaatgtgctgggattacaggcatgagccaccatgcctggcaagacatataaatttaagagtaacatatttgtttggtgctgtcacatacatgctcatatatgtaatttcattttaactaattaattaattaattaattattttaaagatgtagtctcattccatcacccaggctggagtgcagtggtgcaatcttggctcactgcaacctctgcctcccggcttcaagcaattctcctgcctcagcctcccgagtagctgggattacaggtgtgcaccaccatgcccagctaatttttgtattttttagtagagattgggtttcatcatattggccaggcttgtctcgagctcctgaccttgtaatctgcctgcttcttttaatttatttctacataggtttattctacaaatgtttcagggcagcttataactatatatacacatatatatctatatctatttaatggtggggagagtgggtagattttggtcaaaagtacaaaatttcagttagacagatgaagaagttcaagggatctagaacttgtagaatatgatgcttatagctaataacgatgtattgtatacttgaaaatcaggaaaatagtagattttaagtgtcccactaaaaaaatgataagtatatgtggtaatgcatatgtcaattagcttgatttagccattccacaatgcataatatttcaaaacatcatgttgcacatcataaatatatacaatttttattcatcaattaaaaattaatttaaaatacaggtaaaaggggaaaatataaatgggaaataaaaatcatgattacataaaatatcttaaagaatacttttaaaaagggaaaaagctgactcatgaaaatttaaaatgaacacgtcacaaattttatttattttattaattgatgaggaaccagcaaaatgttaaaaactggtccaaagagcacttgatttgtattagatttattgcaacttattattgctgaattagatgtaaaattggttaatgcccaacagagccataaagcataccttaggttccagcagacagactttattcgcatttctactgcaaaaaatctacaaggtaacctctgtcccaactgagttgtaaacagccactaagtaaaagttaagcccagcactgcactaaaagcatacctagtaatctcatttgcctatttccgagattcagacaatttttctgagaaataatacaaaattagtgtgaggaaccaagaccaatatggaaaatagaacataagtacgtaggctataagggcatattgtaattgctgtttgaaaagtgttgtgaattttctggcaggcaaagtgaatagaatatataaaaggctagaagtctttatggttggaaagaagaaatacattggttcctttgttggaaagaagaaatacattggttccttcagcaaaggaacattttttcttttaagagaaagacaagtttatcttgaggagcttcatattgggggtggagggacagggacttggaattacacacgccatggtcctcaaaaacagccttctggcaggtgcagtaacagatgtcatagggctatttcctcaacgtaccctatgatgaaagactcagacataacattaaaatccacccagggaaaatgattccagtgaggcaatggtagagtgagaaaaaagtgagcacaagataattatctgactttaagatgcacctacttgaaccatctctggcaattattcattatcaaagagatgtacaagaatcactcaaggattggtgggccccttttacaattctgccaagggtagtgttaagggaggaggagtggtcttgcaagggcaagaaaaataaattgatatttaaaatgtatgtagcatagtgcttggtataaagtcagtgtccaatagactgtagatgctattgtgatcactgtaattattattattttttattttactttaacttccaggatacatgtacagaatgtgcaggtttgttacataggtctacatgtgccatggtggtttgccacacctatcaaccaatcatctaggttttaagccctgcatgcattaggtatttgtcctaatgctctccctccctttgcccctcacccctcaacaggccccggtgtgtgatgttcccttccctgtgtccatgtgatcactgcaattactactgttattatgtaaaattttctgtgcttcttagacatctacgtttggatgtcaggtagactgaagtttagaggagaccctgggcctggtggtaagtgtttgggagttgtcagtgtacaggtgttatgttaagctgcgggagggcctgggtgagaaggtttaagaggtgcccacgtacacgggacgttacatatagcaaatatggggtgtgatagtaatctaacacccttccacaaatataatttcctcaacaagactttttccagaaaaagaagtcattatttgaaaaagacacatgcacacacatgtttatagcagcacaatttgcaactgcaaagatatggaaccaacttgagtgtccattgaccaacgagtggataaagaaaacatggtatatatataccatggaatactactcagccataaaaataaatgaaacaatgtcttttgcagcaacttggatggagctggaggccattattctaagtgaagccattcaggaatggaaaaccaaatagtgtatgttctcacttatgagtgggagctaagctatgaggatgcaaaggcataagagtgacataatgggctttaggggcttgaggggtaaggctgggaggggagcgagggataaaagactacttactgggaacagtgtacactgcttgggtgataggtgctttcaaaatctcagaaatcaccaccaaagaacttatctgtgtaaccaaaacccacctgtactccaaaaactattgaaataaatcatttgcattgtaaaaaaaaaaaaaaaagactttttccagggaaagtaaccttaacctcagagattgaaatgcatgtctttcatgattttattttgaaaattaagaagatgcagtttaattttcacaaaactctagcaaataggcgtggcagagcatttttatcactctttatagttggcaaattaagatatactaagatataaaagcaaagtgatgtgctcaagatgttcgtgtatgtagcaaatggcagagttaagtctttgactgcagagcttctgactagttcagcgctgttccatcttctctttccatcctgctgtctgttctctctttactgagttcagttgcattgcttttgataaaggatcaaaatggacatgatcatagagagctggtaagtgttttctcagatgctatcctctgccttccttcccagcctggctttctatgcaaacttaataagcatgtttcttctgctgtaatttaggatagtgactgaaatgttaaataatgcagatgcaaggccacttctagctattgtttcttcagtccaaatggtcatactttgggtgatgggttgtgtaaagtagctggttctccattaaggagctgaattaaaacctgaaacatttcatgtgggccactgcattgttgttaggggttagccacagtccatctgactggatagatggcggaaagtaaggaatgttttattacaatccaagaaaacccgaaactactcattctacaagctatcacactaaaaagcaagtcattaaaaggcataataattaaagcagtgctgtacactgaccttgtcacttgattctctgaaacacataaattgtttgcagcatcagtcagcttttgatttgtagtgtctttgaaaaacaatttaaattatgtattggaaagaggccaggagacccatctgctgggagtttgtctttctaaattgggtgcagtgggtagtgctgaggggaaatgacacacctctcttatgaatattttcatgaaccttctcagtctctagagaatccacccatgcactgttaaattgtgttatttgtgggaacacaatgacaagggcctaaattggaaagcaatacagatttagcaagaaaatgttttccattaaagggggacctgctaatttcctgtgtctaatgtaaagagtgagagggattgaatcaactacagcatcaaatgctaacccaaaaggcctactttcttttgttactaaattaacatactacctggtattccatttagataatcacacatcaaaaaacagaattgtaagatttctgtgaagagagggaaaatgaagtaaaaggaaggaagagataatatagttgaacttggaccagagctgctgcttcctccatcttcccactggaaatcaacaatagcagtagcattcagaatttattaagtgctttctatgcatcaggaagtgcaaatggattatctcctttatcctcaggaaaatttcattatttcactttgtaggaaaaggcaatgaagtttagaaagattaacaaattggtctaaatttccctagctagttttctgtagagaacttgcattcttcatagaaatgtcttctctgttttttttcctctcctcatttagctcctatttttgtcctggtaaaagtatagaaaaagaaaaaaaaaaaaagtgaacacaggcgtggcctatgcctgcttgaaagtaggaaagaaggattatcgaaaggggagaaaatgacatagaaaggaatttttcaggttatctaaattgacgctttcattttcaaatgggttaactctagtttcaagataacaaagtaaaacatttgctaaaaaataaatctgtattagaactgttacccactctcagcccagtccctttcatatatcacgttgcttttcatccagtccgggaaatgcccgtttttcccttttgagaaaaatctatgtcggcacttacctgtctgaggttatcttttggtaaaggaatatactgcttaggaacttccatttagctaccggtaaactatgagtgtattctgttgatgtttctgttcacttagcaggaatcataattttcctaagttcatgatgattattatttcaacaattttatttattttttgctagaatgaatttgaagatgccaaatgttccttcaaataaaaaaaatctcttcagtactttcagattatcaagtatggttgaggtatatatgaaggttacttgaaaggaaaaaaaatattggatcctaaaaaacattttggaaaatattatacacaactttaaataatttttcactgtttgatgtattcagtattacacaaaaatgggtttaattaaactgaaggaaataaatcaaaaggagagggctggctgacggttttatccaatgtgacctaggaattgaaagcagataccatcaaccactctaatttttatttcttctataaataagatgcagcaggactggaagcaagtaatctccttcttgcagtcctccattcctttctttttttgcccaaatgcttccctttaattttgacagtaatcaggtaacagatctctgaggcagttcctctgtattatgatgatcagatatatcatttaaaatatcagattattagattagagctccagttcattccttttaagggaattttttaaaagtgatagatgggtaccatctatgggtacgtttggatatgatcaatctgtgtctggttttagtttatgtttaatttgttcttactcagaaagcctcagttgcctaagtagtggctcctatcttatatttaattggtatttttttcaatttgaaaattgaatatgctcacacatgctctgacattttttttcattttatgtcgtttttttccctgcaatccacaaattctctatgtcttccttttgtaagcatgctggtgtgaaacagcttcagtgacaaagcagcttaggaattaaaagagtttatcatacatagccctaggtattactggctgtggaattttttttttttttggacaaaatctgagtctgtcatccaggctggaatgcaggggcacgatcttggctcactgcaacctccatctcccaggttcaagcgattgtcctgcctcagcctcctgagtagctgggattacaggtgcacactaccacgacaggctaatttttgtatttttagtagagatggggtttcactgtgttggtcaggctggtcttgaactcctgacctcatgtgatcctcccaccttggcctcccaaagtgctggattacaggcgtgagccgtggcacccagcctggttgtggaatttttagctaactacttctctgagaggcacattcctcatctgcaatatgggaataattgtagggctgtttcattcagtagtgtatgagaactgcttaattaattttaaaatgaaatgtaaactgatagtagaaatgtaaggtgatattcatgctgtatttgctttttttttttttcctaaagacatccattccaaaccagagaggtttgcacttttttttcccctttaagagagctcccaaaacattacgcttagtgctgactacttctttgtgaccctgctctactttgaatctacctttacaattaagtctgcccttagaatctttacccacaatgcagagatgtatttaagtacatgtttatatcctccttggactcatttccttgaaagcaggtagaaagggtgacctcacttatctttgcatccctagcatctagcgctggggtttgtcagttgtaagttcttgtaagtccctgttgaaccagatttaattcagaagactagaaagcaggaattctttgttccactctttcatttggttctcttttcttaaatgaagcggggtttgcctttctaaaagaatggtttatactgggccacatgtttactgatttttatgaaaagagaaagtagtaggaattaaattgtattcatgtaactttcttttatctttactgtaatcttaaaaaaacaacgagttgatgatgtcaaattgcttggctgttttctgtgtggaaaaaattacttttcagttatttattatgaattacctttcttctttaaataatattgttgaaattaacaatagcagggtacatttttattccaacagggtacaactaattagaaagtactttgggaaattcaattttaagaaatgttttatattaattttaagatataaagaaaattgaaacgtgaatttgaattgagtgtaatgtctttcatgaatttcttttaagtgtgattattatttctaatatccacctttactcaattctcctttaaacatttaataaccatgaataaataaattaaaaaaaattttatttatttttattttattttttttttttactttaagttctgggatacatgtgctgaacatgcaggtttgttacataggtatacacgtccatggtggtttgctgcacctatcaacccatcatctaggttttaagccccacatgcattaggtatttttcctaatgctttcccttccctttccctccatccacctacagaccccggtatgtgatgttcccctctctgtgtccatgtgttctcattgttcaactcccacttatgagtgagaatatgcagtgtttggttttctgttcctatgttagtttgctgaggatgatggtttccagcttcatccatgtccctggaatgaatgaatttttaaataagattcaggcaaaaaataattattagtctttttattgttttctgggctgggtgtggtggctcacgcctgtaatcccagcactttgggtggccgaggtaggtggatcacctgaggtcaagagtttgagaccagccaggccaacatggtgaaaccccatctctactaaaacacaaaaaattagccgggtatggtggtgagtccctgtaatcccaactacttggaaggctgaggcaggagaattgcttgaacctgggaggcagaggttgcagtgagtcgagattgcgccattgcactgcagcctgggtgacagagcaagactctgtctcaagaaaaaaaaaaaagtttgttttctgttagtttcatctaaaaatttctcttcctaggaattctcaatataattttgttccacttttttgtatcatagtaagatatacttaaaataaaacttcctataagtgtacagtggattaagtatattcacattgctgtgcaaccatcacaatctagaattctttcattttcccaaactgaaactctgtacacattaaatagtaaggcccagtttcccgcttttcttagtccctggaaaccaccattctcctttccaactctctgaattaggttattctaggtacatcaggtaagcagaatcatagtatttgtccttttgtgcctgccttatttcacttagtgttatgtcttcaaggtttatcgaccttgtggcatgtatctgaatatccttcctttttaaggctgaataatattccactgaatctctatgccacatttatccatttacctctcagtgggcatttgggttgtttccatactgttaaagaatttcccagtgacttaatgcttctaagcctataattttaccaatttgaaaatgcctcagcaatgatgaatttggcatagtcatttgacctttttactctaaagagaccacagaatgtgctcagggtgctgttactggagccaactgtgtaggctcatatcttgactctgtagatcactaacatgtgagcttgagtagattatttctctgggaccaggtgttcatattttgcaatagaaataataatagcataacaatgtcacaggatcctttgggtgttgcttttccagccggaaacctctgtggtcatcagcacctttgcctgagttttgctcaggcctgctgggctcgttctgcccacttggcccagcaggctgtgcttggctcgtgctaccagcccagatcccatatctgccaagggcgagccaggtgcagagtggcgaggggtgtgtgagtgagtgtggggtccgaccactgcgcagtcaggtgtgccggctgcagcaaggcaggcagctccaaatgctggtacaggtgccagctccatgcgaggctgtggctggatcaggtgtaccgcaagcagcttccaaggtgggtacctgggaacacggtggtgcctggaagcttggagatgccagggactgcggagccccaaagatggtgtcacagccctcgctcggagagcccctaggtctgggctccccaaagggctgcagctcttttctcctcatcacctgccacctggtgagcagggggcaagtttcagccctgtttgtcttacagttctttcaggcttgccaaatggcaggtcccaaattcttggtgggttccaaattcttgtcccatgcctaggaagaatgaggtatgtggacaactggagggtgaagaaggcagagaggagcttcactgagcgacagaacagttatcaggagacctgaaatgggtagccattttctgcaggcagattgtcctgacaagtttaggacatccgaagtgggtagctccttcttgcagctgatagtcctgacatctgtgtgagtctggctgggtccggtggtttttacggactcaggagggaggaagtgcatgttgattggtccatggggggccatgggcgggctcggaaaaagcatgataagttctcactttccgaggcagattctgtctggaactggtagcctggccccaggcttcagcccctccctggcttgaaggtgagatttctccggaaacccgcccctttccgcccagtaaccagtctccctcctgacatcaacatgtagtccacgcgcccaggctgtttgtgctgagggttacctttaggcccaggcagagctgccctcagccactcccctggcccctcttccacactcgtcagtgcccaaagtccaaagggggctgaggcagcagggggctggcatgtcattcctgcccccagcacgtgcacaccctgctgtgctgcgacagcacctgggctcggcctcaactttgctccacaccggagggggcgccgagagtggggataggccagggagtgggaacaggcacttctgagcctgcaggtggaggggcttacctgggtttggagctgtggctgtgtggctgcagcctgaccgagagcgtgggctcctgatgcaaactcggtggggttggggctccccctgttctgggctccctctggccccatggagtgtgcaatcccggccgcaccgctgcagccagctttttcacagcggccactctggatgggctgtctctgccatcaacaatagattgctgtgaatggcaaatgaagaaggacatttagttctgcttgtgaaaaaagtatcgcaaatgagaacccttcttaactatgtcctttaattcatttaaacatatatggactgaatgctgtaatcaaaatattgtttaagtgctctagcaaatgctaacagggctgtagtctttttctttgaggtgctcagggcagaatatatttctgttactacagctgactataaagtacaatttttaaattgtgaaatttttaattgagagagatcatttcagaatataggaaattgggaaagatttcagtcataatggtaatgttcatgtgtcagaagcaagcgtgtgtttcatttaattcttgtgaaaaatatgtgtagcaaattggaagcttatgattggctgcttaataacacatgagggcagtaagtatcagagaggttgcccaagaacttacagctgataagaggcagagttgagttataaacgaagatctgcgtgattacaaggcttgtatacacttgtgttcaccatttcactacatcgtgcctcaggctgaaagtgtaactatttgagatggatctggaaggagttgtaaggaagagtgtggaggaagaacatttcagataacagtggcagagatgtgctcaagtgaagtgcatgctcaaggctccactggcatatgattaagggaaggatgagttggacaagtaatttgggtatgaaattgcggagtagaaatcctaggcagaatgccagttggtgtttgaattggtaggcaatggcaagatatcagagatttatgtacagaaatgtcacagttgccttcatgaaaactaaccagtggaaatacaggcgatgaagaggaggaggagagaagcggattgagaacagttaggaggctgtttgaagagttttatgggagaaggtctggattagggtgataacctggaatgaaagcgaccttgcagaggtggaaccatgggatttagtaacttcatggatgagaaataaaggaaagaatgacagactaaagtttcaggttgagaggacgagtagggtgatggttcttttaacaggtgtaataaaatcagaaggagaaactggcttgacaagaatgtagtgaattctgttctggtagtggagtattgcagttagtccttttgctgatatacctaaggaagaagcataggaaaataccaactttagtggaaaagtaaaaagatgctgcaatatttgaaggtctaaagaaaggaagtttgggctggagataggaatttggaattgtgaagtaatgcctctttctttaaaacaaatccccaaattccaagattgtgtgggggccagattttgtgaccctaatgatattaattcaacaatcataagatacaacttcctgggtgtgggggtatgaaggggtttctgtccctttcaacagtagtccctatcaacatgatgtttatagaagcagtgaaactttgattttgacacagagaacagcagtgacccttcccttaattctttctagttaaactgagacaaggtttaaatgtttaaaaaaagcttcagcaaactcagcatttctcagtgtgttctgcgaaaaatagatttttggcctgtgaattaaaaaagagtttggaaatgctggagttaaaagaagaaaaatttttttttaattatgaaaatcttattttattttactttatttttaaaataaaccattttagaaaaatggctctagttagaggtgaataatctccagaattaaattttgagacatgcctatcatctttgacaaatgctgaaaagtcagattattctgtagaattatcaatacaaagtaatcaaaaaggcggagtaatgtaatctgtatgaagaatatgaatttagccaattctgaacatccactcggtagcataagcagataattgttctcaacaaatgaaactttctaattttaaaaacacatagttattgctgtgttcttgaaaaatagaattgagttgatacaagaaatttaaaaaaattattgaagttatttggtaaaatatcttaagctaagggggaacttatagtgcctatgtcctagaagaaaagttgaagagagctaacaagagattagaagattcagagaggatggagggcactgcgggtgtgatctgtgactctcatgtgaccaatcaatccctgttggaagctgggccctgtagatagggaaaaatgacataaaaactagtcaaagtcaaaattatactactaagaacatactgtttacacctttcagttaagcgattctaaaaaaatcccataatttagtatacattttgtggctcctcctggtggttcaagaaaaaaagagagatgaaaaagctgttttgcaatctgtgcagtagaattcattctttcaacccttgttgttggttacagaactgttttatactctgtttgaagaatgcaacaatatacaccatggcaaccagtgcatctgatgcataccgcattttagccacccaacaagactaataatataatagtaactattttttatttctctcattaactcttagcagtatttttagccatctttaaagccaaaattctcttttattatcctgaagaaaaacggtcatgctgaattttaaaataacatgaatttctgaatataatgggtaaatttcttcacattgttaacgtatttcattgccttcagcatattagattctttcttattttctaattcatatgtatgttataaaataattatttaggtagtgacaaaaataactatgctccattagcatttgggttcattaaatctctgtttatctgaagtgtatagacttctaacattattgggttaaaaaaaaaaaaaagaggccgggcgcagtggctcacgcctgtaattccagcactttgggaggccgagatgggcagatcacctgaggttgggagatcgagaccagcctgaccaacatggagaaaccctgtctctactaaaaaaaaaatacaaaattagctgggtgtggtggcctgtaattccagctactcgtgaggctgaggcaggagaattgcttgaacctgggaggcagaggttgtggtgacccaagatctcaccattgcactccagcctgagcaacaagagtgaaactccgtctcagaaaaaaaaaaagtgctagacaaaaagaattgaactccttttataagatttatctcttcctgttttcttttctctttctccatatcttgatgaataaaatagaaggtagggtgagatggagctgagttttaggagagcggacagctgtctttcccttttccttctcttcattgcacttacatgatttggtagaaacttcaggaattttagatactttggggtcattattcagcaactcaatattttactgttagatgtatgaatttaatgaagacaaagtctgattaacagaatttatctgtattttcatcattcttgacgaaataataatgataatttgacatcccactgcctaaaaacaacttaaaaagttctagacaaacttttgcctgggagaggctcagccagtgtggaatcataaccaaaagttttgtacactatgttcatactgtgcttagaattataaaaatctatttatttaatacttatatcaactgtataaaatggaaattagtatcttggtttttcttattgtatggggagaggatcaggaggtttggtcagcgtattggtccgttttcacgctgctgataaagacatacctgagactgggcaatttacaaaagaaaggtttaatggatttacagttccacatggctgaggaagcctcacaatcacggaagaaggcaaggaggagcaagtcatgtcttacatggatgggaacaggcaaagagagagagcttgtgcaggaaaacttcctgttgtaataaccatcagatctcatgagacttactatcacaagaatagcatgggaaagacctgcccccatgattcaattacctcccaccaagtccctcccataacacgtgggaatccaagatgagatttgggtggggacacagccaaatcatatcagtcagtatataagaagcggggtagagatctgagccataattcaaaggccaggtcttttttactatggctctggcttcctgtgtaaagaataaagaggaatggatgtgtagagccacagaaatttacccaatcatgagaggttattgactattttccaaaatgctttgctgttaaagttcattctcatggtcagaagtgagctcatgcattcaaacctgggaaaacatttagatcatctttggactgaggctgctcaattacattaccagtgtgtgttggggtcaaatgtagtacatgataaactgagctcagtggactaactccttctgtatggcttgagttcccctccacctggttcaacattttgttataaaaaagttacaatatgcagaaaagttgaaataattgtatagtgaatatttataagtccgtcatctaggttttacaattaaactcttatgtagcttactttaaaaataatggtgatgtcattcaaaactggactgtccacctgtatctgctgctatgaagacagacatatctgtatttctaacctgtctactaaattatctaagggcttccctcaaaatatccacttttaaaatactattctatacctaacctaaaccactccaactgagatatagttccagttgagtgtgtcagcaaacttgtcgtgtttgtttttcacaggtaaaagatttgcattacaattaagttaccacacaacacccacctacaccaacacattacaaatgctaactgtgagtctatttgcttccccacttcgctcatttcttctaagggtgaaaaataggcaatgagagcagaaagccttctagggaagtctctctcatagtagtgtgtttcccttctgcatctcttttgtgggttttaacagaaagaggctgcttcttaaagtttgtattgagcacaatcctgctccatatttgtcaagtggttctcatctgaagatttatgagggcattagttataccatagggacctggttggtttcagtgttagttctttgaagctactagcttcagaggacaatgtccatattttaatttagtaatatgaaagtctgcctttagtctccttattcaagtttttgggtagactttctgattatgctccatggttctcccctggagggcaggatgtgggactgaagattcagggacagtaggcattgattaaaaatatatactgtggcaatggactttggggacttggaggaaagggtgagatgggggtgagggataaaagactacacattgggtgcagtgtacactgctcaggtgatgggtgcaccaaaatctcagaaatcaccactaaagaaattattcatgtaaccaaacaccacttgttcccccaaaatctatggaaataaaaaataaaattatatataaatataaaatatataaaattatatataaatataaaatatataaaattatatataaaattatgatccatatatatatatataatccaatatatagtatgtctggttagtacactgtggtctggttcatagaatcagagaattcaaaatccaggtaagttcagtttaactctctagtttttttttgataattgagctgtgtgataaattatagcttctatatatgaacagccaaatttttttctagttgagtatgtcatttctgtacatataagtgctttttaacattaaagacatattagaaagttcatctataaaactatgaacatagaatttgaggtgtttacaatgctagatttatatgaagccatgtgttttggtaacccacatgtgcataaaactggcaaattgtaaaagccccagagggtagccagcagagggtttttgtttgtttgtttgtttgttttttgttttaacattactccagttagggaactgttgatcatgggagaaggaggataggcacagaagaaatggcttttgactcaggggaagaatcttcctggtaacactcagtttggaaagtcttcagcacatctaagatgccttttacactgtataactacaacagatatctttgaaggagacatttttatagaaggcagtagcagagtgtttacttcataggagtttcactactatgcatttccagtattttagatttgtaaaatatcaaatggggaaaaattgctagagaaatagcataataggtaatggagtaggggtagcagtttagagtgaaccttgagcgcttgcagatggcaacactgtgcgatgttccaccttctatgttcacatttcacttaactttgacaccttagatagacactgacacacatggcatatatccaattccattttttacatatcagctacttcagtggtgtctaatcttttggcttccctaggccacattggaagaattgtcttggaccacacataaaatacactaacaatagctgatgagctaaaacacacacaaaaaaaatttcataatgttttaagaaagtttatgaatttgtgttgggccacattcaaagccatcctgggctgcaggttggacaatcttgagctatctaataatttcaaaatattgcatgggtctatattctcatcctctcatcttgttcacactaggctggcattcagggcaggtatctgctttcctgtctcagacttcctctaccccagagcttcctcagtggggacagagggatggtggtaagtggaatgggcagtgctgggctggaagcaggtggccgtgcagcctggtgatgttctctatactcagcccagctgggagacacgggcaggagacaaacaacaaccctttaatctttgattcaggtactaaccagattcagattggaggctgaattcctgatctgcctttgttagaaggcaggtctttgggggaagggtcacaggtggcgggtgacaagtctttggagaagggaatgctggactaattgcttgtggcaggacaaggaaatgaccaactggctctcaggtcagcaatccccagatacccatgaaggtcatacccaccaacaggattacttggctctgtgagagcagtgttggaaaaaaatgtaattcaggagtattttttccctgttaggtttctatagaaacaactgtaacatatatgtctattgcctaacttagttaggcaatacatgtattagttaggcaatatacgtattatactaatatatgtattagttctataacatatatgttatagaaacaactataacatatatgtctattgcctaaagtttaatgagagacattaaactttgtaacaatttttaggaatatattacttacaaaaatagtataccatttcagaccccagaactgacagtattagtgtgcaacggcataagatatagaaataggagaggtgactcagatgctagagcagagctagcacgaccaaggagaaaaatgggttccaaatcaggataaagtatgtacactagcatttcctcagtgtccgggtgacaaggagtcagtggtttacaccagaactgcagtgataatagctatgtaagtggggctgctagggaaataagatatcttttagaaattgttaaagaagcataatttacaaaatttttattgagcatctactattccagcaactggaatgcagcattaaatgaaacagaaaaccccttgctctcttggcattaacataatactggaaatcaagtatactcgatggactttgtacttgttattctagtgaccgtgttaggagcatgtcttacagaatgatggctgaagtatcttgaatgagttgcttacttcttacttaagtggaattgtcatggttactatattccatttcagctctcactggagtgggttctgagatgtgaaagaaaggatgatctgaagaaattaatagaaagaaaaaagggttgagctgagaagaaatgcagaatgtgtacattctctaaagggagaggaaacagtttgctacaggccagtccaatgtagtcacttccagttcccagatttaaggatggaaatggaagtataacagtggctgataatttggaatatatcttagcacttctttctgttaaatagtaacacctgaaatatgtacaatgcctcatgacttataaccttcttttacttactttatcttattggaacctagtagtaatcctttaggtaattggaaaaggtaatattagcttaattatgtgcatgaagacaggtagatggactagcagaaggagtttagagtctttattctactcatggcttttaaccagagctcaatatgtaagcgttttctgggtaacccaaatggtaaaaaaattctgatggtctcctaatagtttcatgggaggacacagattttcggggtgtttcaggtccaatgggaatgattctgttttctctgtgtagacaaatgctgctttaattttgtgtagatatatctctaagttgtgttcttcttgaaacagataaaaaccaatgctaggacagaggtaattctacacttgatcttagccaaaaggctgagaagcaattcagaggtaattctagagatcttgttctgctcatattttaaacgagaaaactgagacacaaagaggttattggtttaccaagttaaaaattcttaatatagaattttaataataataatgtaatatagctgaaactcatataattacttcaataggacaatttaataatatagcagaaactcaactgataacttcaacaggacaattatgttgtaaaattgatgaaaatgaagtctgtagacacaaacatacgataaaacatgtgctcttactgattcattgacttctcttagccataatatttatctaccaaatttccctttatttttagtggtgttttatatttattgcagctaattgattctgcagagaaaaataagccctggtgcctctgacaggtgcagcagcctcgtgcagtatgttctcattatgcttatgtaaagtaagtctctactatcaaatgttaagaaacaacacagtggggcaaattttaaattaatggtttcagaaaatatcctgcagcctcatagtgtatcttgtcagctctctcaaattgtggacattcatcagaggtcttaaaagagaatggcaggaagtcagggaactgaaggtttagtagtaataaatggtatgtaagccaatatatagttggcttagtgttgttctgtgggataagaaatgcttctaaaccaagaaattacagaaaacatgcacaaacatattttttgactttggacagttcatgacggtatccttccaagattaaattaagaaaactaacacttaatttcatagctcaataggaattgttgaaattgtgatactgtagcaaactaaattaataattttttaaaaaataattcaggtattgtctgggcacagtgacttatgcctgtaatcctaatgctttgggagcctgaggcaggaagattgattgaggccaggagttcaagaccagcctgagaaagtagtgagaccccgtctctacaaaaaaattaaaattacctgggcatagtggcacattcctgtagtctcagctactcaggaggctgaggtggtaggacagcttgagcccaagactttgaggctctagtgagccatgattgtgccactgaactccagcctgggtgacagagtgagaccctgtctcaatagcaataaaataataataataatgcaggcattgagctaaaacaataacttggagtccgttaaaaggctgacatgatcagagtctctcactaatagtcaaggtataaaagtcccacctcttagatattattatagatgacacccattctgagtctattctctgattaaacccaggcacttctttcctgttttatgtccagcatgtttgtcagagggttttttttttatacctgtcttggtgtatctgagagtaacatatctatgtctgggtgtgtttcagagacagagattgaaattcatcatctccatagccctcatctagatcaatatttcatgtttttaaatgataggcatttcaagaaaagaagataccaattttgaggagtatagtagacaaagggcatgactcactgcttgttcatgtaaatcttctacctttatcacaggacagaatatgctcagagcaccaggattctccttttccctccttaccaccctccatgtgcatggttggtgtgatggtcattttgatgtatccacttggctaagcagtctccagttattctatcaaactctaagtgttactgtgaagtattttatagatgtgattaaaggaagaccacctaacaaacttccaaattggatgttcttaaattacaaccaaattcatcctaattttctttctttgaaatcctattgggcaaggctcagtggttcatgcctgtaatcccagcactttgggaggccaaggcgggtgcatcatgaggtcaagagatggggaccatcctggccaacatggtgaaaccccgtctctactaaaaaatacaaaaattagctgggcatggtgatgcatgcctgtagtcccagctcctcgggaagctgaggcagaattgcttgaacccaggaggcagaggttgcagtgagccgtgattgcgccactgcattccagcctggtgacagagcctcaaaaaaaaaaaaaaaaaatcaagaacctcgtgttggagaccttcattggttcaatgatattaaaaaccctgtagcactcatttgctgcattcatgtctgtatttggggtgcaaaagcttggggtatcatattgagcaatgtgttagctcagatttccataacaaaatgccacagatagggtggcttaaaacccagaaatttatttaattcaaactggcagtgtctttgctggtataatcccttctctattcctggcttctgttgagatggctgattaagttcatgtgttacacacacagtcttttaatcaaatggctgttcagccacacccctcgtattctcttcagagcaagcttttttttttcttttcttttctttctttcttttttttttttttttgcaatatggataggctgagaattttccaaatcttcaatttctggttcgttttgcttaataattccgtcctcaactgaactccttcccttctcagtttaccagaagcagtcaggaaaaatgaagctgctccttcaatactttgtttagcaattccctcagattcatcacctgcagttttaccttctacagaacactagaacacagttcagccaagtttttttttttccactatataaaaaggattgcctttcctccagtttccattaatatgttcctcatttccatttgagacctcagcagaatggcccttaacgtctgtatttctacattttgtacattattttacgtattctctgagaagatggaaactttctctttttccttccaacttgccctcgtcttttatttctgggcttttgctagaattgcatataaaatccatatttttattatgaacctcaaaactcctttagcttctacccattcattacctagttccaaatctacttctacttttttttttttttagacggagtttcactctgtcacccaggctggagtacagtggcgtgatctcagctcactgcaacctccgcctcccaggttcaagcagttctcctgcctcagtttcccaagtagctgggattacaggcatgagtcaccacgcccggctaatttttgtatttttagtagagatggtgtttcaccatgttgggcaggctagtcttgaactcctgacctcaagtgatccaccctccttggcctcccaaagtgctgggattacaggtgtgagccacaacgcctggcctacttctacatttttaggtatttcttggtaccaaagtctgtattagtcagcttaggctgccatgacaaaataccataaactgggtgacctaaaaaacagaaatttatttccgacagttctggagagtttgagttgtgcgtgccagtatgatcgggttctgacaagggctttctttctagcttctcactgtgttctcacagggcaaagagagggatgacaaaaaacaagctcttggtgtctcgtcttgtaagggcacgaatctcatcaagagggctccaccctcatgatctcctctaaacttaatcacctttcaaggattccatctccaaataccatcacattgtgcattaggggtttaacatatacattttgggagaaaacagttcagtccataccaagcaaaaatgcggatgcttatttcttaaaattgacatctgttcttaaaatgttgtatctataattgccaaacctattcaaatgtgttatatctgaaagtttgaattagttggcccttttcctgatacccttcattaatttatttaaaatatttagtgtggggcctgacacagtggctcatacctgtaattccagcacttcaggagattgaggcgggaggactgcttgagcccatgaattcgagaccagcctgggcaacataaggagaccttgtctctacaaaaaataaaaaaaaataggtgggcatggtggtgtgcccctgtagtcccaggtactcaggaggtcgaggtgggaggaatgcttgaggctgagaagtcgaggctacggtgagccatgtttgtgactgcactccaggctgggtgacagagcaagaccctgtctcaaaaaaaaaatatttagtgtataccttcctttctttttttagacagagtctcgctctgtcacccaggctggagtgcagtggcgcgatcttggctcactgcaacctccacctcccaggttcaagcaattctctgcctcagccttcggagtagctgggattacaggtagcccgccaccatgcctggctaattttttttttgtatttttggtagagacagggtttcaccattgtggccaggctggtcttgaactcctgaccccatgatccacccgcctcggcctcccaaagtgctgggattacaggcatgagccactgtgcctggacagtgtataccttctatatattgtagattactgtgagtgctaggagcattaaaagaaacaaaaggaaggcttcaggtgcataaagcttacattctattggcaactgcattttttttttttgacacagggactcactctgtcacccaggctggagtgcagaggcacgatcttggctcactgcaacctccgtcacctgggttcaagcaattctcctgcctcagcctcctgaatagccaggattacaggcacgcaccaccatgcccagctaattttttgtatttttattagagacagggtttccccatcttggccaggctggtcttgaactcctggcctcaagtgatctgcactccttggcctcccaaagtgctgggattacaggtgtaagccaccatgcccggccggcaactgcattctttggagtgtccatccacacaaacatattttcatttgacagtctggaacatctcacgtattgctagcaagcaggtttggatgctgatgtttggatctgaatggagcactactacattaataaaagcagatattaatcccgactttttgttttatatgggatttgtttatatttttaattgtcaaagaaaaattatatatatggtgccaacagtcaactgattttcttgtcattgttttgatactatctgggagacagcaacatttttacagattctataacccttgaagaaagaacacttctatgtttttggcacatattgcaataaatggatggacacaattccttcattggcagattcatagcaactaatagcaaaaagaaaagtaatgtgatcttttacaaaattcgaacatttctatctcagctaggtcaacaattcataggagaataagctaaaaagtattgtgggagttttctgtactaatgaagttaaagtactcagaatgtaagtttttatgagacaatctccagtagtttaaaaaattcactgtggtatagacatcgggcttttggatttttaaaaaatttcaacttctattttagattcagggggtacatgtgcaatcttgttacatgggtgtattgcgtgatgctgaggtttggggcatgaatgatcctgtcacccaggtacggagcatagtacccaataagcagtttttcaaccctttctccccttctttcctctgccccagtagtcctcagtgtctgttcccatctttatgtccatgtgtacccagtgtttagctcccacttataagtgagaacatgcagtatttgaatttctgtttctgagttaatttgctcaggataatggcctctagctgcagccatgctgcagcaaaggacatgacttcattccttttttatggctgcatagtattccacgctgtatatgtaccacattttctttatccagtccaccactgataggcacctaggttgattccaggtctttgctatttgtgaatagtgctgcgatgaacatacatatgagtgcatgtgtcttttggttagagtgatttaatttcctttgggtatatattcagtaatgggattgctaggtcaaatggtaattctatttttcattctttgtgatgtctccaaactgctttccacagcggctgcactaatttacattcccactaatagtgtatgagcattcccttttctctgtagtcttgccaacatctgatattttttgaatttttaatcatagccattctgactggtgtgagatggtatgtcattgtggtttttgcatttctctgattagtgatgttgagcatttttacatgtttgttggttgcttgtatgtctccttttgagaagtgtattcatgtcctttactctgtttttaatagggttatttgttttttgtgtgtttaagtttcttatagattctggatattagacctctgtcagatgcatagtttgtgaatattttctcccattctgtaggttgtctgtttactctgttgatagtttctcttgctgtgcagaagctctttagtttaattagatcccactcttcaatttttgtttttgttgcagttgcttttggggacttagttacaaatttgccaagaacaatttccaaaagggcatttcctaggttttcttctgggatttttatagttttagatcttacatttaagtccttaatctatctcaatttcattttgtgtatggtgataggtaggggtccagttgtattctttctagcggacatcaggattttgatgtataatttgcttttatggaatgttgatgagtattccaaattctttggaactctcatacactgctggtgggaatgtaaatggtataagcactttggagaaccattcagtgttttcttaaaaagttaaacatgtgcataccatgcctagctcttccaacatagagaaataaaagcataaacccatgcaaagacttctatgcagatacttatagcaactttatttataatagctccaaatcgaaaacaacccaaatgtctatcaactggtgaatagataaaaaagataaactattaatacatgcaataacatagatggatctcaaaataatgatctaggtgaagaagccagacataaaatgaatctgtgttgtatgaaaaattttagaaaatgcaaactaattcatagtggcagaaagcaaatcagtaagtgcctgggaatagggatgggagcagggagggccagtctacaaacgagcatggggaaacttaggagtgatgaatatatgttcattatcttaactgtggtgatggctaatgtgtaaatcatcaaatagtacactttaaatatatgcaaatttttatgctttaattatactctaataaaactatattttaaaaggaaaagatatttactcgttttgcacataaaacatttactgtgcttatagaatgtaataggaacagcaccttttattgtaccattcacttttcttatgtcattatatttcatttatcttaattcacataaattttatttactgattcatttttgatatttaatttttaaattttgtgggtacgtggtatatttatggggtacatgtgatgttttgatacaggcatgcaacgtgaaataatcacatcatgaagaatgaggtatccatccctttaagcatttgtcctttgagttacaaacaatccaattacactctttattttaaaatgtacaattaagttattattgactatagttaccctgttgtgccaccaaataataggttttattcattattttttattcattatttctaatttttgtacgcattaactgtctctacctccccgatccccagccccctactacctttcccagcctctggtaaccatccttctccctatgtccatgaatttaattgacataaattatagacttctctcctaatgctttttcactctctgtctagtatatcttcaccagttaagattatgacaaagtttattttcctgtatttttcaaactgcacatatgtccctgctctatggatttttttttaggcttttaatgtcactctattttttaaattgacaaataaacattgtatatatttatggtacacaacctgatattgtgaaatatgtatgcactgtggaatggctaaatcaagctaattaacacatgtattgcttcatgtacttatcatttttgtgtgtggtgacaacacttaaaacctattctctttagcaattttcaagtacacagtaagttgttattaactagagtcaccaggtacaatagatctcttgaatttgtgaaatttctgactgaccaaatctgtgatccctcttatttatattcccatctgctcctcctctatcctccaaaaactactgatatgcaatatgcttaacagatatctaacaatatcaaccctcactacaccttgaaacttttcagatgcagaggtgatgcctccacaaaatcccttttgtgtattttactccttgtagctcatttctagtcaaacacctaaaaaagactccatagaacttccctgttttggagactgtagcatttgttcttttcttccagtatatgtgtgcacaaatattttggtcatattatcattcatttaattagttaattatttttttcattgacaagtaaaaattgtatgtggtatacaacatggtatgtatatatatgtgtatatatacacacacatatatacacatgtatacaaatgacttaaacatatatacacacacacacatatatgcacatatatacaaatgacatatatatatacacacacacatatatatacacacacacacatacacatacattatagaattttgggctattttttttttttctaattttagagtctgtttctcaaaactttggtgtcatttgctgactgttttgtccaaatacataagcacgtggaaaattgtaacccttaaaggccatcttttgagcatgtggtcctaaatgagatggtcttaattcctcacattttattatcagaagctactagaattataaaaagtccattagttaagactgatgttaagacagtgtccaacacactgtgagtttttcagaaatcttagataacccagtggcaataaataatcgccattttcaaggtacatttgcctgttttgccaagggcaaatggactctttcaagcagaagtcaattatgtctgccttttgtaggtgcaattttcccctcacccactgggcccttagggtacaattcaaaagagatttgtgcccaaaatgagtgatggtctttaacaactgttaatactgagtaccatttgccagaagtgtcctctgccttttcattcaacctcagtcacatactagcatccatcataatgcatttgccaggggtttccaggatgactttaagtagtaatgttagtgaatgagaagaaaagtgcccagtgagcctagttagagttggtgctggatgtcttactttataatgactgctgcatatttgaaacatactcattgatcaggtttcccaaattgcattatgcagaactctagaggttcatgagatattaataggtggttggttaaaaaaattagagtgtcatggttaaataaatttgggaaagtgtgttaaataaagttaagcagattcatctgctgtgggatttctgagaaccttccatatgtcattgtgaattttgaatctctaaaataagcatatagtacacagcattgcctaaacatgtttgatcacagcaccctttttcaaaatttaaaaatatccaattgcatcttgcagaaaatgaacactcttctaaattaatttggagaagtctttctgtatatacttccttttgtatatgttttcattgcaaatcaaaatgggagagattggaaaaataactatataacaaagtgagagagaatgctataactaaaatttagcaagaataaccttgtctccatacttgtatatggataatgtatttaaatatattaaatattgcaacacatacattatacaaaatgctatacatgtgcactttgtgcccttttaaatattaaaataaaacatttcttgtcattatttctctccagtttccctctgcaatacagacagatgctaatagataatttcttcgtgattgagaatattttaccaaaatttaaaaaactaaaataatggtaaggaatgcagtttcaaaagagtaactataatactttatttttgtgtatcaccttacagtttgccaagtaaccttggatatattatcttatttgagtctcacaatcattctgcagagtagacaagcccagcatgagctctttttacattaaggaaatgaagatcagagagattaaatcacttactgatgattcccacagccatggggcaccacgaaactaagcctgccattctgcctctcacctgacagagaaagggaggggacaaaattcctgaagtgtatatatacttttgaaatattttgtgcttttataagctgtcttggttcactaaaactttggaatacaaagccagtggtgatttgcagcaatatactaatccactaacccaccccaccagtccttttcctcctcctccttaaaaaaaaaaagcaacaaaaaaacccaaagaggcccatattctccattttcagaattccaatcatagaggaaaggttttggctaaggattttaattttatttgaaccccctggaatcgtcttacttttcttggcaagcatcattagaaagttaatttgaggaggtgatatatagaatgtcttagagatgattgaacatcagagagttaaagggatttgttcaataatgtgtagtaaagttgtggcaattaagagtgacagagaggaaaaaaacttttcctctatgctcctaagttcagtggctaggagcctacacatgtaactcatgaaagacagattaacacaagaaaaggaatacaagttttattttatgtgcatgggagttcacataaaaggactcaaagaaaagaagtgaacccccacagaaatggttataccgcagggcttatataccattttaacaaagaaaaggggggttggctctgagggatgataaactgtgggaaagtgactgtgaaatatatgagtgaaactaatggaagataagggttatttcagtaaggtatgtttatgcagactcatcttggtgccagctgtctgtctctggtgataagaattgctctcctcttcctggtacagagagatggacaccttcattcacgaagggaaatttatgctatcttcacaaagggaagtttatgtcctgcttttaagtgggcaagggtgggcagagaactcttcctgcatctattgctttccaactgccatcagctcaaaataattcttatcccaaagtgtcatattttggggtggcatatcctgatccccttcaccagtaaaatctgggattcctacttcattgtccagtgtttcccccattttactacgctggcaaatgtgtttatggaggaagataatccggtaagtgagttacaagttttccagtgacatagaatgatatgaaaaaaattatgagtttagaaaagttgaacatggtagatagagttcagtgttgagtaaacaaggaaaactaggtttgtgcacagtttttggtgaaagagtagaggccaatcacatcatccaccagcaaagtaactcaaaactgtcatttccttcatgtggatccttgtcatagtcttcatgactgaacaatgacattagaattgttgattttattatcatcatcctcgtacccaaaccatcatcactgggaaggagattatcaccagataatgactacttctttattttcctgtttttgaactacaggaataattcctacaaaagtttgagctcatgtctgagatagtagatatcagatgcatgttgaacagtttttttctttccattggattttgtcacttcctttctttttccttaaaaaataatgtgaggtcgggcacggtggttcacgcctgtaatcccagctctttgggaggctgaggcgggtggatcacctgtcaggaatttgagaccagcttggccaattggcaaaaccctggctctactaaaaagacaaaaattagccgggcatgttggcaggtgcctgtaatcccagctactcaggaggctgaggcaggagaatcgcttgaacctgggaggcggaggttgcagtgagccgagatcccaccactgcactccagcctaggcgacaaaagcaaaactctgtctcaaaaaaaaaaaaaaaaaaaaggtgaaactttatgcttgacaattaataaaaataactttatcataaaaaagtaaataactaagcaaaaccaccaaaggaaagactatagtcaagtggttgacatattcttgaatatcttgggagtgtgtcagattagtaagtatttaactttgacttcccttccccgacaaaaaaattcaaagcatttcagtgtctccatattttaattaagtgaaaattattcaaatattatttggcctttgattctagtgacccctcattctttatgaatttgaccctgctttggattctgggagcccaccaagtaaattccacttacagttctggtcattcctcagtcagtctaacaaggattcccttctatatgacagttaggagtttgagtttctctaagcttctgtcctcaggcttctctcctctcgctcacatcctggggtgaatggtgatgagataaaccatcacaaaatgagcattttgattatgacagcgaatctcaacagcctccagatgtgcatttccatgtagttatttctccagtcctgactaggcacatgctccagccagaaagcccaaattctcccttttatttccacattcaattatctaatgtcttaaaaattccacctcctaagcattgctcatccgtttcttttatttatttatttatttatttttattattattattttactttaagttttagggtacatgtgcacaatgtgcaggttagttacatatgtatacatgtgacatgctggtgtgctgcacccactaactcgtcatctagcattaggtatatctcccaatgctatccctctagaactagaagtaccatttgacccagccatcccattactgggtatatacccaaaggactataaatcatgctgctataaagacacatgcacacgtatgtttattgtggcactattcacaatagcaaagacttggaaccaacccaaatgtccaacaatggtagactggattaagaaaatgtggcatgtatacaccatggaatactatgcagccataaaaaatgatgagttcatgtcctttgtagggacatggatgaaattggaaatcatcattctcagtaaactatcgcaagaacaaaaaaccaaacactgcatattctcacttataggtgggaattaaacaatgagaacacatggacacaggaagggggacatcacactctggggactgttgtggggtggggggagaggggagggatagcttatccatttcttgatctccacctgtactacagacctttgtcatttcctaccttgaaaattgaaataggcttctttttttctaatttccaggctagccctttctggggcattttggactttctctgttaataacacttcaatacctatggagataaagtccaaacaccttgacaggacataaagctctcttgtgagtgggtccttgtccatcttttcagtctcatctcctcccacttcctctaagattatgacatatttcctctgggaaactatttgtagttcaccaaatcacctctttctctcaggcctctgtggctctgtacagactcttgcccatctgatatgactttgcccactttgtctcttgggagacacttattcatccttcaggtgacattctcttatgcaaccatctgccatgggttcactcccacagcctgtttttgcagacattattaatggcaggtaacacatattttagtggttttagagacctgtgtgttttattgtaaaagtttgatctctttgagtatggaaatcttatcttgtaattctttataaccccaattgcaacagcaatagaaaaagtaagatccatgagtataaacaaaacaagcaatgtgcgagcttttatgaaacaattttttatataattgcaaggtctcaaaagaagatatgaataaatagataggcatgacatgtttttgcttaggtaaattctatatcacataagtttttcctaagttaatctatatatttgaccttacctccctgagatattatagatttcttttttttgaactagacaacactcaaatgaaaaaaaataatgaatcaaaaatttattgaaaaaatacttgcaaaggagagtaatgtatgagggaactggtctggccgaatattattaaatactataaaatgtagaatatagtatggaatatgaaaagagacaaatcaatgcaacagaagagaaagtcaagaaataaactggatacatatgaagattgactatatgatcaaggtgacatcccaagtctgtagagaccaataattggtgtagggtcagtggtccagtttgagaaagtgatcttgtgttacaccacagtaaatgatagtgaactgaatacttaaatgtgagaaatgaaagcataaaagaaacacagtcatgtgtcgcttaacgacagggatatgttctgacaaattcatccttagaatgtacttacacaaacctagatggtatattgcctacaacatgcctaggctatatggtatagcttgtttcacctaggccacaaacttgtacagcatgttgctgtactgaatactgtagcaatcataacacaatgatcagtatttatgtatctaaacatggaaaaggtgcagtaaaaatacaatataaaagataaacaatgatacatcggtatagggcactaaccatgaatggagcttgcaggactggaagtcactgtgggtgagtcagtgagtgagtggtgagtgaatgtggaggcctagaacattattgtacactaatgttgacttcacaaacactgtgcacttaggctacactacatttatattgaaaagcttttctttcttcgataataagttaaccttagcttactgtaactttttgactttataaacattttgtttttttaaacttttagactcttttataataacatttagcttaaaatacagattcattgtacaattatacaattaggatataaagaaattttgttttctttgtatcctaattctataaactattttctatttaaaaattttttttgtttttaatttttttttcttaaacaaagacacaaacacccacagtagcctcgccctacataagattaggatcatcagcatagctgccttccacctccacatcttgctccactggaaggtcttcaggggcagtaacacacatggagctgtcatctcctatgacaacaacgccttcttctagaataactcctgacagacctgtctgaagctattttacagttaacttctttttctataagtgatggggaatactctaaaataagaataaaaagtatggtatagtaaatacataaaccagttacatagtagtttattatcaagttttatatactgtacctaattgtatatgctattatttcatacaactggcagtgcaggtttgtctacatcagcatcaccacaaacacatgagtaatgtgctgtgctgtgacataatggacagctgtgacatcacgaggtgataggaatttttcagctccattataacctttaagactgctgccatatatagtgtccatcattgactgaaatgtcatcacgtggcgcatgactgtattttaataagccgtaagagaatctttttataaccttgaagtgagtaaatgctttttaactaagacatgaaaacaataagccataagaaagaagactgatgaattcaactacatatgaatcaagagtttctgcatcatgcaaagatcaacataaataaatttaagaaataagaaatcagggagaaatatttgcaacttgtatcatagacagggctaatttacctaatttataaaaagcttgcatttctcaaaaacctaaaaatagaactactctatgacccagcaattccaccattaggtatgtatccaaaggaaaaaaaaatcagtataccaaaggggtacccacactgcatatttatcacagcactattcacaatagcaaagatttggaatcaacctaagtgcccatcaaggaaagaatggataaagaaaatgtgatatatataatcaatagaatactactcagccataaaaagaggatttgctatttgctgcagcatggacagaactggaggtcattaggttaagtgaaataagtcaggcacaaaaaggcaaataccacgtgtcctcactcatatgtacgagctaaaacagtcgctctcatggacatagagaatagaataatagataccagagactgtgaggggtgggtaggaaggagagaggatgaagagagattggttatgggtacaaacatacagttagatagaagaaatacattttaacgtttgatagtagactagggtaatatgatttgaatgtatgccgcctccaaatcacatattgaaatgtgatctgcagtgttggaggtgggcctagtgggaggcatttgggtcgtggtggtggatctctcatgaatgtcttggtgctgtcttcacagtaatgagtgagttctcactttatgagttcatgcaagatctggttgtttaaaagtgcctggcacctcctcctcttccctcttgctccctctttcgctacatgacatgctggctccccttcactttccactatgattgtaagcttcctgaggccctcaccagaagcagatgccagcaccatgccttgcgtacagcctgcagaacaactgtgagctaaataaaccttttttcctttataaattaccattctcaggtattcctttatagcaacacagaatggactaacacatagggagactattcttcacaacaatattctgcatatttcaaagtaactagaagaaaggacttgaaatcatacaacacataaaaatgataaacagttgagaagacggatagcccaaacaacctgacttggtcattacacattcaacatatgttacaaacacatctacctcataaatacataaattattatatatcaataaaaggagggaaaagctcccacattcaataaggcaaagactgatgagccaataaaaataagtaaaagagatgagaagatagtggaaaaggaaatataagtgcctcttcaacatgtgaaaggaggtacaacttcactcacaagagcaggacaagtttaaatacattgagctctcattatttatccttcagattagcaaacataagaagtcttggtaataatttttgttagaaaatgtggagaaacaatcttttcttatagactgttgataagagtataaatgggcacaggatttctacagggcaatttggcaatatctattgaagttacaaatatacatattctttgatccagcaattttacatattatttaattcacagatttatttgtaactgggttaatgtacttagaaatatcaatacaattttaaattaaaaattaaatcaacttttgcttaaaagcatcttcatttcagcatcttttggtctagtgttatcttttcccttttccttatcctgcctcatggtggggcaatatatctccttacatttggtttcaaacatgtaggactttgtcatgaatccattatgaacctgactgacacatttctctgaaaattttgtactttaaaaattgttaacaattagcagaaaaattagaacaaggaaaatggttactcttcttatcgtctattttggaaccaaaaagctaacattttatttagcctgagaaagtaaatggtcttaaatcatcgatatgccatccattgcttttccaaaacagtgatatattttttaaaaaatcagttatttctttttgggtacatactttgctcaaatgttatttacttattttaacttataataaaaatggataaaatatgtaatacatgaagctgcccgatttgagtattttgtgcagcggttagtataaatattttgaccttcatcttgtcctctggggaaaagagtaagctttcagcttttcagaatggcgttttcacacatatggccacaggctgtgctatcctggagaagcaggtggctaagtgtggttctggtcacagagcacccaaagatttatccttgcctgatgacaactacactcagaaactgtatataatcagcagttccattacaggatacccaaatacgatgttcttagggcatcagagtatgtttttttcccgtgtgcttcttagaaagtgttttattctccccatctcagaagaaaactattacttacagaagagaaagggctcttgaaagactttgatgtcagaaaatatgacttacaaccacatcacattaaatttaagacttcgattgctaaacagtgaatatacatacagaatttattgatgataaggaaatttgtaccttaaactacaattaagacttaaaaacagaagcaaataaaagtgaataaataagccatgttatacaagcacaggcataactaaaattaaaacacgtattagccttctcactacttgcacttgactagtcttaacaaaagctagtattggagtggactgcaaactcaatatgaaaccatattgtattgtggtagagatatggcagcaaaaagatgcaatatacataaattgcatagttctgttcctgattactgtgtaactccaaactagtgaactcaagcattccagttcacctcctctgaaatcttgccacaacagcatacacttttctccttggagccatcatcctgtagtgtgttaattcttacattttacagtagttttacctggaaaaagtggtacctacaccattaacttattaagcttttcctttttttttttttttaactgaatgagtctttccttttgaattacatttttaatggaaataaactagggttatagtttcaggatttcccaactgcataggactgtaaacattatataaagctttgtgtgctacactttattagcttttaaaggcagttgagtggagtttattgtacataagacttgcatttgtagttagagaaaagcctcacatgattaccatctgtttgcttttgcaagtgtagccctagaattctgatatgccaatagaaatgttattttagttttagttcacactggaggttttccacaggcaatttaattctcctatttggaagaatatttgtgacccctggttataagccaataggctcaaattttgaaatttacttacatgaaattaacacatgataaatgatataagaatttcagtttaacttatgtttggtgcaaagctggagttcctaaaataagcctttggtatgtggtgtcatatgtgaattaaaaagtgagatgattcttctgcagaaaggtaatatataaatgtatccaaattctatttggaggacacaggggggaaatggtcattttccattttgtatcattagtgggatattttattatttaatagcccagacactccattactgaaagtaagcacaatccttgctgatggtaggcagatgaggctgtgattctatattctgtgtctaggtggtggataggagcagtccagtccagctgtcccacagactcagcctgttcattggggaaaagggctcagtgaccacagctaacaaagaaaagcagggagataaagcaaaaaatcttgcagctgctgatcagctgcttcactcgtggggcctcagagaaagaatttaatttgtcctaaacagcatgttttaagttacagtacaacacacctatccacagaagtatacgtggaaggctgttgggaactggttcttccaccattcttgaatcaaaggttttaaattataaacatgcagacaaaggagaacactgttctgtttaggtttttgttttttgagctgcttgtttcaggatgctgttgaaatcagagcaagaactaagtgagatggatgtggtattaagtagattcctcaaaatgatggcaaatccttgctgttctttagtttaaatatattctgaaaactacagagtgccttaaagttttgaaaactgttttaaatatatattcactattttaaaattttatgtgttctctatatattttctcattctccatacctttttagttgaaatacttttaaatttatggcaatgggtccaattgttaatctgaaaacatacattaagtacaaaatagagtatgcaaaaaacctgtaaacaccaggaaatttagagccctgaaatatgtctggagattggagaaaaatacatcgagaagatttttcataaatgtaactaacctgccttttaaaaacatgtttatcctttatttcccgatcatgagcatcccatgattctagagacttcagctgggtcagaggacccacagggcatattctctggctcagtgttggaccactcctgatgataagtggcttgggaaaggatttggatttctcaacatttgactgtatgtgtcttctgtaaagtaatgcagagtaactcagtgctgtggtaaatcaagtttggaaatactcaactgtgtattttaaaaatgttttttctttatggagtagggatgtgcttttaattctcactgtatcttcattaatgagcccaaaggttttagattctatgtttcctaaggccccattgttgagagtacacacacacacacacacacactcacacacacgtgcttgtggtataatatgccagcactttggtttgggaattaggcagaagttagcaaataagagaataatcctcacatggcaaaaggtgaaaaaattgaagaaaatgtgaaactacttctggggcttttaccttttgcttttattttgcctggtttctctttttgaaggaactgtattgtgtgattcttatttgaagaaattgttgatatcagtaagattgtataatttggtaaatataagtactctgagagaagtgtttcctgtaatgtcaatcaatttaatcactatccacttaaaaattgttctctctactacaaaaccaatatatttccctcaaagaacatttcaaacatagagataagcccaaatgaaaaaagagttacctctagtcctatcaaaatgtaatattggattaaaaatattttaatgtatgtatgttttaaaaacctcatttgtttacttattcatccatttatttattcaacaaatacatactgagcgtagactatgcacctgacattgcactagatgctgggaacactgaagtgaacaagacagttaaggtccctgctctctgagaacttacatcctagttggggaaaacagtcattagatatgcaaataaagaaacaaatgagaccatcaatggttgtgataaatgctaggaaggaaatgaacagcctggtgtgatggagagcctaaagaggagtcctctttagacatggtagatgggaaccaattcaggagatttataaatccatacccaaacagagtattttaggtagagaatgccaggtgtacacagtttttaacctgtcctctttcccactagatataaatgtcacagttcttcatataaaactcttgtggtaatagatagcttagaattttttgaacctttgaaacataatatggttaaatacatacattaggtaacattttcagcagtgtctggggcagtggggcagcaatctgtcatacacacattaatatacctctagtgaagcaagaataatcacactgtgtgagaaaatgactatgactagcctcacttcagattaggttttggtgtcaaatgagtcctggtcagaaaaagttttgctgctaaataagttatatataaacttttgattttctgcatattttggatttaaagataatagtaaggggatggtggagctgtatttcataatacaaaacagcataatcaatttcgctaatgtcacatttttatacatctatgctgtttccatttaggttattcaggtgagataaaatgtttaagctgggataaatgtttttctagacatatatttgtggacattagtgatcattttcttaggatatatttgtaggggaggtgaaattttatctctgctctcttagagttctttgggcctgagaattaaactgacttaaggcagattaacaggagaaaagcatacaaatttatttaatgtgacttttatgtgacatgggagctctcctaaggaaatgaagacccaaagaagcagttagaattgaatgcttatatacagaattggacagagagtagtggattgtgaaaatgtgacaagacaaaagagcttggcctagagtcgttaatcatgaaaaagtaactagaagataagggatagtttaacaaggttggtttgtcaagatttctctgggtcttgactccctgtctctggtgacaaggatgtaattttccttctggtatagagaggacatcttacatatggatattttatctcctgcttttaggaacaaaaatggggaggtcagaggatccttcttgcacttgctgtttttttaagtgcctttagctcaaaataattctttatgccaaagtggcatattttggggtggcatagtctgccacccttcacattcaattgttatgtaagggttgtgcaaacaattttatgcatatttcttatgtagaaattttattttatatttaaaaaataagtcctctcggaagagtttcctaattctgtagctgagttgagggttattattctcataataccatgtctgaggctcaaatttcatcatgtttaaaagcaacaacaacaacaacaacatgttctttggtcctggttgtttttcactttaatgcctttacacttgatcctccatttataacagaaactgcatgtatatagagattggattatttaccacgaaaatgcagccattcaggggaaggaggagaaggtaattggtttttattccctatcaaaacagaatgattcaggacctggagttatagaaaagtgtcctttatttaattacagaaccatgggccatgttgacagatttctgagctgtaattgtcttttctgtgccctcattgatttggttatgcatctgaccttcccgattaaaatctgcctgggaataactccagaatctagtcttcacagcttatcctgttgagaatgcgataggtctttcctttcagagaataagctccatcagtttctcatatcaactctggtttaagcatttgtgatatcaaggtcacatgtctgctgtataccctcttaattaaccataccctttctatggctagtgcctgcggtgtttcaagtgagataccagtttttatcaaagctttagagtcaaaatgtcaaatcattgctgtttgtggcaaacatataattttatcactatatctgttaatttagcagaaaaaatatgcaatttgagaagtgtgtaaaactttagctataacaatataaaattcaaggattctgccattatttacctgtattccaagagtcaaatgaaatccttctttaatttctagccatacagaacctacttttatatgtgtttattgaatatacatatcacatattcaagacctgggtgcgtcgttcatgagcatgctattccattggatctcacaggcctctcatccatagatgcctatcactgagatctgtatattttagaaattggaatgtcaacattattcttcttagaataagtgaaggggctttgtgggcgtgagttgtgactggttgctaagaatatctaatcaggttgcattgctatagcaacagtgttgctaggactttaaagtttccctgcaatcagttggaattcataagtgaaagacattgtttatctcagtggtattttaaagtgatcctagctagcataaggcaggaatcccatactttggaaaggaattgatagccccaatgaactgcgctctaatttatgattcgttcagagtgtgtaatctacagaaccagggtggtaatttagcagcctgtttttccaggtgttttgattcggtagtccctacctagtcaaagatcatttccatctgactcttccaagagttcacaaggttatcatacattgataattttaaaaggaaaagtatcatttcatatttctgtcacagagcagaaacttgaggactccaaaaattatattattatttttggtttatatattattggtatttatgtctttctcaaaatgataatagctctatttttctaattatagtagtacttcatacttatctaaaatgtaggcagtttagaaagcacaaaacagatagttaaaaatctcccagagttaactacttttaacatcttgttgcaaacattacatatatctatagttgctaaataaagagacataaaacatatatgtgtttccttggcagtggcttttcttaaaggtaactttacattatattttcaaactgttttaaaactgtctttatgtttggtctattgtggttttgaacattttttttcccctcaaacatacactcaaaacattgaaatggtcaggagttagtcttaaagtcaaaagcctcgtgtttactaaatatctgctttgtcctattccaaaagtatttaaaatatttagcttaaggatttcataaatcaccatcttagtggaacttaaaatcagcattttttttttctagttttaggccctaaacttttgagtgagggaaaaaaggttgtgcaactgtttcattccaatcttgtatgtggaatttgattcaatttaaggaattaaaataactacatatttttaacaggttgagcactagagcccagagagttggttttaggttggctggatatgggtttgcatcaggcatggactataagtagcattccctgtctgttgcatgttattttatggagaccccaaaatgaaatgaaaaataaaatggaaatgaaaaataaaagagaaaatatttgaaggttccctaggatggctgggtaatcaataaatatcaagctgctcatagtctaaaagataaaaaagccaacatattttgataattaagtatgtactaggcactgttgtaagagtttcactattaactcacttaagctttatgataaccgtatgaaggttctatgacttgcgataaccctaggaggattctattattattcccattctacaggttaggacactgaggcagagtgaggttgaaaaactcacccaaggttgcatgactaccatgtctattaagtctcagagccaaaattcaaacccggatctacctacagagccagctcttaaaacaactgtgctttattctaaaggatactggttggtttgtttggggtaagttagatgtattcacggcctatgatttcatccacagctttgctggcccagaatctttttttttgttttttggttagcatatctaggggtgcactatctttctcaaactccatctttctccaagttattgtaaagatagtgagaaagtgtatataaagcatttagtactgtttcagtcatatagtgttcttaatatataggagccaataatctcatcatattggatttgggagacattgtctgtatagatgtggatcatagagcttttttttttttttttttttttttttttgagacggagtctcgctctgtcacccaggctggagtgcagtggcgcgatctcggctcactgcaagctccgcccgccgggttcacgccattctcctgcctcagcctcccgagtagctgggactacaggcgcccgccaccacgcccggctaattttttgtatttttagtagaggcgggatttcactgtgttagccaggatggcctcgatctcctgacctcatgatccgcccgcctctgcctcccaaagtgctgggattacaggcgtgagccaccgcgcccggccagagctttttatctattgtttacagagcaggtttaaagattttgttagaaataaccctggcacataatagtgtctaactttgggtaagtccctaatctttcataagtcttcattttctcctatctgtgagaagatataataatacctaatcttcaaggtcgtgattaaggatgagaatagacttagcactaacctaaataaataatatgacaatttttaaatagtgtgattagttgacatttcaaagggtcttgctttcctgaccatatgtccgaactttaagaacatctaccttgcagctctctgtgccctgcctactgaatcttcaattgttgaactaagtgttatgatttaatatgttcatgaggccattcaaaatattagtattagttttcctttttgcttactgcccttaattcaacttaatgaataacgaaaaatatatgggttgtaggatgacattgaagcatgttccattttccatgcaaacttcgtggtctaatgattattgttacatatggtgccatttcacaaggtaatttaaaagtagtataaaaaccttatagattttgaattctcaattgtggtatattttgtcttatcatgttttctacttacatgaatttttgctcatttattttctggagggttgaagaaaattcagcataaatttaagaggctttgctcaaggtttgatgaataacaaatagcacatttggggagaccagaaaatgattaatgaaggagataataatgtggtcattaaaaggcaatattggcaaaacatacacaaactttttcagaaagaaagatgtaaaaccatttgagagactcatcagagaaaattctcatatggctttttttttcaaaaattttttttttcttgggatagggtcttactctgtcactcaggcaggagttcagtggcttgttcatagcttactgcaacctcaaattcctgggttcaagccatgctcccactttggcctcccaaagtgttgggattacagacatgagccactgcacctgacctgtattttttcaaatttcctagtagagggcaagtttcctgtcattgggggaaaataggcagagactgaaaaggccttagagaggtatatacctcatctaatatgtggcccatagaatcatttgtggacactttcagtactccggaggcacaaactcttataggttcttcacccgccaagtttctgcttggcagtttgtgcctatgtgccaaatactgatgcaagacagttttggtataatgcaaaattatcacatatttttggcaactatcctttccactctgagccctcctgccatctcttctctgctccagggatgctcttctctaggtctcacattcttcactgaactgcaaccgtagccttgcatagggctaaaaagctgatgaaggcattagctgattgtgtaattcctccctccacctcttgtgacaagagtgttaacccatctcccccaacataagttttgtccttttttaaagagctaccttcaagacacaaaggaatgaaaatagacaatagggaaatgaatccaaggcaggggtgcagaaaggaagcttgattctggtttgtagagacacattctactggaaaggctctaaagaactactgaggacaagaagatgtgaagaagccactttgctgctgccattataccctgccctctgaggctgaggctgaggagcatgggttatccttgactgccctacctcccatcaacttggagtgcttgaggggtcacttctccatactctggcctgaataccttctccagcaggtgaaggtgaattaccgctatcatctactatcccgttcacttcatttttatgcagtatacacttagaaatgtggtataccacatgcaaaaatgttatgaacacctacagtgaatagacagttcttaatttaacttaaaggtatttcaagaaggtttgtagctaatctttgacctcttatatatgttgctgtattttctctgtaagggtttgtttatctttgtgttttatagagttacatatgaaaattattttatattccttgagtccattatatagcttaattttcccaagaacatgtttcactttcaagaaatgtgtgtgtagaaactctgattcggccacttatctattttgtgaacattatggttgatgatataagctctacagaattttttttaattaaaaaaaaaaaagatgaagcccagactgctccatgcatgtctttgatattttttgtttgaagaagaagctctgcaagactgaagcctctactttggcctgtcataaataggaaaagctaaaccaacattgcagaaattagaactatcatacattttctgcagactctataatttagtcaactgactctccctttgtgaagtatgctgcaactacaaatcttttggaaacccatattatttgggttccatccaaaccttggatttgcatctatcattcacacgcagaattttgtatagatttttgatgtgccagttgttttaagtgcacttgaaaatggattagaaaaacttggcaagtgaaggtaaaacttcagctgcagcatacaattcttatggaagtttctattaagtaggcactctgaccccaatggtatgtgatgcaatgggattcataccaattactctgaaaggctttttctccttacctttattttagtgtcaaataacccatcacatcatacttgatcctctgatattgaaaacattcattttctgaataattggatgtggtgggtataagagcagaagactgctgaagaactccttttgtggacttaatgagatacaaaaaagaaagttcaaagtaatatgtgtgaaagcaatgggaattcatcgcaatttttgattatacttcccttgaaaaataacaagatgaaatgtttagtgcattagatttttaaagagctttagtcgtcagtcagtcttgatgtctgtgtgtttaaactgacaaaccactgttctgtagccggaggcaactggctgaaattaatgatataaaacacaggtaacttgacaggaagtcattttacaaatagtggttgtgacttggagaaaatttgaaattaagtctatcatggagtaagggccatattttgagagatattagtctttgaccatcaatcaaaacaccagcttacaaataaaatgcatgattttactttggtagcaaaatctcaaaggaaccatcgcgtaaagaatcaatgtcataggagttggtcatactctcttaggagaaaagcctatgtcaatggaagataaattaaattttctttactatttgacagcttgctagttcagaaatctagagtttagacttaaggttagcatccatttgcacttttgccaaatatggtatgtgagatgacttttcagggtgtagccaggatcaaccaaaagtaaaactctaaagaatataccaattctagcacctgcatggtttctcctcctatcatcctgcagaggcacaggaacctgagcatgggcggtgtttctctaggttgttcttgatcatgcttcagccaagggatgtaacaacatccttcagatcttcttgaagggctaatttgcaggtagtgtcattctttcacttttaattccttgagatacggataaacagacttgacttactgcttctgaaaggtcgctgattcttgcaacaatatcaatttcttgtgttaattctataatcctctgtggtcatctaatatgctttttatctaatttgacacataattctaaggtgaagctgaacctcctcaaatattggatccctccccaaattaaccatttgaggagaacaactatgcaacttcctttttgagcatttatgataagattttaatgcttttatttaaggtcgtaataaaaggggtatgtacatacttacatgtaaagatacaggtatgttcaggttatatgtataaaaaggctagttaataatctactgctagtggtttttaacattttaaaatatcccattaacatattttttatttctcaataatatttaattaaaagttcttaccaattctctatcactacacataggatgaaatggaaacacagagcgtgttttctgaccacacttgtaaatagaattataagcataactttttttgtacttaaagtttgccctaggcatatacaagtcagttcttctaagcaagatagtttcggttaaatgttgttatttgcttttggatagcctttgatcatatggacagaaataaatcaggtataataaaacacacacaaagtattccagaaaaaattgtatttgtttttgactaataagtaaatacaactatttttcttggtttgtattagtttttagatatttttgaaagaatggattcaatcttttaaaaattaagaggtaactgatttatgaacacagattaacaatcattttgagacattaaaaataccatctgtacatgagaaaattataatggtaatcaacaaaatttcagtacttcccagaatctggttttgaaactttattatgttttaggggaaaagctctcatttttctgtttgcttagatgagttagatcactcatttaaaatctgaagaagtcaaattattttttataaagatccagaataatagtgtatgtatttctaaataatctgaatatgtttacattggttttttttttttaaacctaggctaggaagggattacctattatctaacaaacatagtgcaactgtatagataaggggcaaacttcaaagattggatattgtttattatgtgaaagatacataggtcttgctatgatttggaagtcctaggtaactggttaggcttttcaggattgacagcagctgtgcagaaattttgttaaatgcttatcattttaaaaagctgtattcaaaatatttctaattttcactattttttaatgtaaatgtttttgagagtcaaagaagattctatacttttacttatgaagcagtttgttgttgtttgttcatttctttttttggtatggggtctttctctgttgcccaaggccggagtatgtagtggtgcaatcacagctcgctgcaggcttaaactcctggtctcaagccatttttctacctcagcctttctagtagctgggagtacaggcaaatgctactgccccaagctaatttatgttttatttttattttttgtagagacagggtctcgctgtgttgtgcaggctgatctctaactcctgggctcaagctatctccccactttgcctcctcaagtgttgggtttataggcgtgagctatggtgcccagcctgaggcagtcttaacgataatttgttttttctgatcaaaatctaccaaaatggccggctgcgctggctcacgcctgtaatcccagtactttgagagaccgaggtgggtggatctcttgaggtcaggagtccaagaccagcctggcaaacatggtgaaaccccgtctctactaaaaatacaaaatagccgggcatggtggcatgcacctgtaattccagctactcgggagactgaggcaggagaattacttgaacccaggaggtggaggttgtagcaagccaagatcacgccactgcattccagcctgggcgacagagtgagactctgtctcaaaaaaagaaaaaaatctaccaaaacaagaaaagagcttaatgaatgtatttgaaaaatagaatagtgtagcagtccatttagaggataaggatataaaatcagggtattgctttgtgttcaggaaacagagaaaataaatgatttttctttctttttagactttttcacagatattcatttgttatgaggcaggggctatagcattaattaataaataataacagcatggagcatattctttggaatgcagttcatggcttcttgcctgggacagcagaacagctgtttctgctaaattactggaatgtgagaagcagtgatgtaaacccttcaaaagcacagagagggaagggcttttttttctgtctcttgaattccaatgaaaagaagcttttatacacagagaattcagagtgccctgtactcttggaacataacatttcttctcccttgcatattcccattattcagctaggtcgttagtgtgagttgtttttaacagcttcatgggtctctaatgatcaagctgagatcaagtttgccaaaatgactgaccacttattccagtgatggatctaatgtagtctctcactttccactcttgtttcaagacaatatggctttaagtaagaattttccatatatataagtacgtatgtgtatgtgtatgtatatattatgtgtatatatacacacacacacccacacacaaacatatatatatatatatatatatatatatatatatatatgccaaggagccttattttggggtgtcgtgttctgagccccgacactgtctttataaggagataactttctgaaatatatgcaagtatttatgattcattgaatgagatatttattacgcatttatgaaaacctctgtacttctctatgtgtttgttagttaattcgtgttacatataaatatgcattaagtaatctgagccacagcttttgaggagcttggaatctaaagaatctaaatggaaagagacagagatgaaattgttttaagaattaactatgttttaaaatattaacaataacgaaagtaatgcttaaagagcataaccttcagcttcccactttgaagctggcagtcctagcatggctttcttcatcgtccatttccctctttttaaaaccttcagagcctttaaatgtttcccccatttgggtaattttatattaatatgtaaaccttgacataaaaatttggggattctttggtgattaggggtctagcaagtttgcttctacacacagagagagagacagaccctacctgggaagggaaaatagggcaaattatcaatttgtccaattagtgttgctggacatatgtatttgataatacaaataaatgtcgagactagtatttcttagcaaattcagccacacaattcccatcttttatgaaatgcatcctttaccagattggaaactaagaggaaaagcattacttctattaaaatcaattctagtttcccttcctaaaattgggcattacttatctacatcatatttggtacgcaattccaggataatcacattttccaactggacagggctctagttcaaatgcttcacctttcacagtgacttagaatggtttagagatttatccagtgccttgttcttggtgagtctagcatcttagtcgcatcctgtaagcacttgatcattgcctgccactagacactgagtgtacatggaattttagggtatcgttcattcatttacagcttaccataataggaaaatttagaaagtaaaactataattgctacctattctattaatcttgctgacattctaattcacttaccttgaagaatttaagccagcagatttggtgtcataagaatcatggactatttttagcaaagacttcatatcacttttcattgactggatgatgcaatgatgagacttgaaaaattagccaaattcccatcattgtgttttatcatcctgatggaagcaatgctgttgaatttcaagaggttagcataatcaatacaatgaagttacagcaaaaggggagatgtctctattattgaagttttacaaaaatattaaatgtttggattgattttttttttaaattgcacacacataactctgtggagtgtctaatagtcaaaaataggttgagtgtgatcaggataaatagctaatgcatgtgggacctaatacctaggtgatgagttgataggtgcagccaactaccagggcacatgtttacgaatgtaacaaacctacacgtcctgcacatgtatcctggaacttaaaataaaataaaatattttaaaactaggttgagtatgaatgagagggaaaacagaagtgagccagttcataattataggctaaagattatagtgaaatcagatcacatcttacatttcacattattttttctgtacttagacattaagccctcatttcgtttcacaaacttcccaccaatgatctaacccagcaagattctgtccctgcatgggcagccccagctacctcagccccgtctgtgtccacctcccaccctccagtccattcccttggcctcctccatctttctcatgcccatcatgcatgctctacccttgggtccttggtgcagagaggtctactctgcctggaatgctctatatagatatgcttgtggctgactctctgattcctttcaggtccctgaagaaatatcatttctcagaggtattgtgtctgaccacaacatctaagatagcaccacctctgccataagatagcaccacctctgcttatcatatgttgcctgtatctccaccggcaacatttcatcttcatttatttaatcgttgttttctgtcttcatgttcatgcactacaccataggctgtatgacagcggggtctttgttttgttcattgcaacatctacagcacctacatcagtttctgacacttagtggatgcttcataaataattgagagataatcaatgaattttcttcacgagaagataatttttttgatttaatcgtatgtatttaaaaccctttctgtagaagacatgcacagattgggggaacatattgcagaacacattcttattggggacccctctacactacaagaagataattttgaaaggcaacagtgaaggaaacagataaagtccctttcttcctagggcttacaaaatttgttttgtgtgaaaggtagacttcaatttaaaccttccattatagtaatgttacgcatattctagttcattagcacagtacataggctcatattaggcttaaagagaccaagaaagagaataaaaaccagaaaagaatatagataaattccttagtttgttaacagcatgaaattatatatttatcaagagagcatgctcctccatcacagaggcagggtttaataaagaataaaatatgttaatattttactcttaaagattactagtatactagacactctctcagatagacacaggtgagatagcctgttattgaaatttaggatattagatttatttttcctcattaaaatttttctctctctagttacttaatttgtcaatttgactgagagaaacaaaaatttttaaaggatacaaaaattttccttgatctacaaaaataaacacatgagacactattttgttttttaatctagcactgtcaagggaatacttcttataacaaactgtacctgccagaagttttgtaactaagcaatagtcacatggtctgtggctagcaggataattgcaaagtacttaaggacaaatcattcccttgtgtctttgtaatgactgtataacttgttccttaaagactccaatggcattatgcaaatttaaatacacttctacttcccacttacaaagagcatacaatgaatgctatatatgaattattgtttgacgctagaagataacacaatttaggttattggttctatgcgtttgttagtcacaaaatttcatgtcctgtgatagtgatgaaaagtagaatgttttatttaaatatttatctttcccataaaaaattttcttttagataaataaaaagaagtctgtctttacatattataactacctattcgtgtgaattttttaatataatatttcatggtatttttggcacctctctttttgtaggataccattgattcattactctaggagttttcttttccactacaattgtaaaaaagctaaaattctgaacatgatcatctttttttttctaattcttacatccataattcatgtacaaagttctccttaatagtcttctaactagtcatattgatcttttctgccccctgccccaattttccttaaacataacagcagtgttctatctatagacaccactctaaacatgttgctgctcttttgtttttaacaaggtaacatgtacaaaatggctaccttcatacacgatgcccctcaccccacacaatgcacatactgtgatgtaaaaattgtgacagaggaagaaaggttgtatatgtggatttggggaatctgcctgggtgtccccatattccatttcttttctattactccctccacacacatttattttgaagtaggcccatctccactagtattctttactttgtccaaacaaatgtacgtttctctttgtgccttatggataaactccaaattcctggcacataatgttccttctattcaaaaccttgctaaaaatcaatctcttgacactttctaaggcttctcttcaatcatgccttcattccttcaaaatgaatgcaactctctccatatgcagttgtaattagctttgtacattatgtttcttggcttcttgtgaatggctaatgagtacctctctctttttctctgtgaaatttataaatttaaattgctaaggagatctgagggtggaggggaagggggtctcactctgagatcagaaattgttttgtgaaaaagcagcttttgagagatgtagaggtatgggtagtataactaatgtggaggaatggctgctatacctgatagctatgtcactttaagaagtaggcaatgatataaaggtgaacttatgtagattatgtcactttcatgggcattttaattttctagtttataaaatgtaaaacagaaacagcaggttaagtaaataaatgaaactggttgggcccaagaattgcttgctttcttggtcattttgcactttggcattcaatagacaaagcgtatatggtacatttattttccctctttactataaggaaacaacacaaatgccgtaatacgtggccacggacacttgggacctgctatgtggaaagcaaatgccctatttaaaaaggaccgctgcaatttagttctatctgttgtcatgtaggaatgggagcacaatattgacagactggagttttcagaagaagtaagcagatttttatatgagatctcctgacttctaaatgtgaattctaacaaaacccaaaccccaaccatgtggactgaatgaaacacaacaaagccatatccggcccacagattgctgtgatatatgtcctgaagatcctttctgtgccagagaactatgattttaaattccttgataacagaaaccgtgtctactctttcctcttcaactatatcaacaaagcattttaactggagatcaacaactgatcatcagatatttttatcacatcaaaactttcattggattgaatttttgtaggaaattttgacctatagaggtattttcagtggacagggagcattggtaattctgaggacaactatttataagaaaaggctcaaatgctgaactgtggaacatagaaaagatttagtagcatgcaaagaaaatagatcgaagtagctggagagaatgggatcatgtctgggagtgcaggacgatgagtaatcaaggaaaagggagttattcataatagtcagctctgctgactggccttttgaaggaaaaaaataaaaaatgattagtatagggaagaagcaatttgatttggcttagaggaggttattggaaaccttggaaagggtggcttttttcagtagttgggatggaagccagactggagaaggttaaagggattagaggtgagaaactgggagatccagaggtatgctgcttttccaggaggttggacacaaaggaagaagggctggggtgagagtggaggaatccatctgtttcagtgaagatggcgtgctggatatggggaatacctgtgcatgcttgaagttggatggtgatacatcctcttcattgtccttggtatcttggaaagtaagtgattgtctccttttgacttgcttatcttgcatatgcgaacccctctatggtgtgtgaataaactattttgatagtttttgggtgggatgattaataaagttatgactcattatttgtgtatattcagaagttcagtaccatcgctaactcacagattacagaatatacgctatctctcctgtgtctgaaaatcactctagtctgtaagcacctccagatcccaggaatgaatccttaaaggcaggttatgcttcaataaagttactgtggggtcagtctgagccaagagtgttctgtgattatttttgctgattgttcagaacctgatctctgcctgtttacctgcagcccttctactgagttcagtgtctgtcttcttcctggggccaccattattggagcggaaccatatgcttctgccctggagactgcagcattatatcaggatgccaagagctaaggaagagctcatgtccccaggtgtcttacagccatttccttttatccctattgaatgttatggcacacttccatgttcacaaatttaaatattcctgctggcctattatttgcagaaaattaaacgtaactgctgattgggaagtatataaataaatataaataaatagaaatctatctatttgttgaaattttctcaaaaacaaagctcacatagaggaaggagactagtggctttatttagaaatggtgattttggatgaaatgattgatttttttgtttacagtacactatcaggttatgtaacatggtgacataattttgtttacgttaaaaatagcaaaataagatggtgtaaaatgtgcattcccctgacttcaccatttatttatttcaaatattcttctactctggtaaagctattaaaataggtgactgatgataatccatcaaacaaacatttatttaacacacactgtggattttgccttggtggcaatggtaaacaatttgcacatttgcttgtatctagtaggggatgtgagcaattaagcaactgcaatagagtgcagcaagtgccataaaatactatgagagcacagagtaggcaagcacctgatccagtgggacagaggcttctcagaggtaatgacctttgggatgagacctgggggaggtgtagaaggtagccaaacaaatgtggttctgaacagaggggaaaacaggtgagactgtccagaggtcagtcagaacacagcaagttagaaaaatgcagagaacacttgttatctctcgttcatgcaacaaacacacatattaagcacctatgttgtgccaggcactgtgctaggcactacgcaaaggtgactgtttcatgatgtttactatgcagtcaggaagctgatacactaaataattgtaggatggtatataagcactacaatagagacatgttctaaggacacagtggaacaaaggagtaaaagccaattatctttggaggtatgaaggaaggctggagatttattttgcaacaactcaagtaaaagaggcccttttttggtttaggggcttaatttataaattgaccttgtcctactaagataacatgtttgctttgaagcaggttttgggataagaaacctaaaataaatgagaagaatgattttatctgagacaacaaaaaatgcgtattgtttccacaatgaggaaaaatgattcactaactcccgggttgcaggaaagataccccaaagaccatctacttccattacatattgctgtatgtgaacccaatatacccagtctcctcaggtaggggattgaagtactcagtcaactcaatcatggtgtattaatataagctaatatcttggaataacatgttgctacgtgttctgttagtgcaactcagcttctaaagacctgatcatatctggtgtcaacacaatagagtggatttagaagataaaaataaaaagctggatttagagtaactgaaaaaactccaggcactttgaacatatacataagtgtggattatatattacttgctattaattcttagaaaaataatattttaagaaagcaaaattattctaaaggaaagactcatgataggaggattcgttttttgtttttgttttttttgttttggaaacagggcactctgtcatccaggctggagtcagtggcatgattacaactcactacatcctctaactcctgggctcaagcaattctcctgcctcaacctcctgagtagctggaactataggcacacacaacttcacccagctaatttttatttatttatttattttttgtagagatggggtcttgctgtgttgcccatgctggtctaaagcaatcctcccacctcaccctcccaaagtgctgggattacaggcgtgagccactgcgcagccagatttgggtatttttaaaagatagctataaatgaacgtggccggagttcttctttagaaaatgaaccttgaggcctcaagaaactatagtaattagtgggtctgaggcccaccaagatccaatgaattgaagtgaactgctcagagttttatacccacagagagagcccgacctattcgtctcttcttgttcttgccagtgcttgctctctgtccatccatacctcagaatgactgacttatctcgacggccaaaaacaccactctcaaaatgccctagtagattaaagaggtacagttatggagatgtctattgaccttttcttaaattttgtgagagaaacaataaaacatgaatacctggtcatttgattagcatccatacaattttacatggttctcattgttctatttgacattggaatgtataatctgctttactttttaatttacttgctaataagatatagttttccacatgaaaagttaataattatatttattatctaaaacaaaaatgcaaattaaaaatcttgtgtactatgtgaattataaataccatgaaagggcaacaaaataggagtgtatagaagggtaatattgaaaatgaagtgtgtgtttcatctgtagaactaacataaaatcagaaaagagtcaattgtttatataactaaaaaaaaccaaataatatattagggaaggctcaaccatttagagaatggaatgtcttatgtgtggctcacttgatatcttcttaaacaaggtggtcatctctagcctgaatgaactgtttaacaaggagaatgtttgacacaagaacctacgtaattttccgtagctcaattccttactgatgagatttcaaacaacaggactggtttggggctacctgattaggagtctagaatatgtctgtcagatttgtccttgatgctcaaattaggtaagatctcaaaagatagaaataaaactaaagtagttttaaaagcagagaataaaaatcctatacagaaaagtgtgataccttttgtaatgtaaatgcaggattggactcagtgcgagaaatgaaggaaaagaacaggaggaaatctgttacaagctgaatatgggtcagtaattcactgccattgtttaaaaaaatctgcatcatgatgactatggcttatattatttctatgtttgtgaatggccaaggtactctaagaactaaaaggtaagactaaagaatgttaaaaaaataatccaaataataggaaagaaaggaaaagaaggccgtagatgagtacaggtttaaaacatttcaaaagatgagctgaaaactgccttgtatagacacttttaagaataggaaaagatttttaagtgagggggatgttgatcatttccactttatattgagatggaagaaaaatgggcttggtgaaaggaaaaagacattttggtgggctatcagagtgatagatattatgagagacaaagagaatagtaaaatgaccatcctggaaagcttcactaagataatgaatggtcatttttctttaagatttaagatatttgcttgcttgaaaaatacttaacagctgacttgaattgtctgccagttttgtgactctaatttgaagtttgccaaaaactctttaaaatatattacaaattttaatttaaaataaatggagggaagagctatacaacattagtatctgtgagactcctattaagatgcattagaaaaaaattacttttataataatttattaattggctcaaaatttctctttattgcatttttctggagatatttatctttccctgaacccattcattcatcttgccttggatctatttatttaaggacagagaggatgccgtggggactgttgcagggtaatgggcagatgggctgacttcttgcttattagtaagctgggatgatctgactctaaacttcttcctaagggatagaggcacttaaaatgaggtttactcaatcatggaagtataattaaagtaaagatattatttcatctccctccctcccaccccatttctatttttttggtattcttgtttgacttgatgacttagtgttatcactgatgaaaccttaagtagaccagtggtttgttcttttgttcttttgttatcaggatgggacagatgtaactgcagggttcagcaggaggtagctaggagaagcttctcattaaacaagaattgagaaatcccatctgaacacctcttctcctattatttagtaaatggagaacacatgataaataaaacagagacattcttaatatcaaatgcaagggtatgcaaaacctgcaggaaactctatgtgtgcttttcttctttttttccatctttttctttttgaaaacaagacatttgtattcactcaagttaatcatagtgtgttttcaggtaatcataattagatgtaattactgtgtggtcaagttatagcttaactcctcgatgagcccaatcgagtactttagacataaagaacttctcaaacccaaacatcccaaaaatccttgacaggaacgctaatgctatcataaatgaatcaaagcattattttgatgctaattaacagttctacttactgtaccactctaaggctgcacacactgtttgaaaaatatatgcaacttaaatcataagcttgtttgttttttgagagagaaagagatatagaatgttttggattcatgtcttcttttgttgatctaatttttgaattggtttctaatatagaaaagctgttgttagatggcgttgtcccagacttggggcacaaactgtgtggagagccaaggaagggcatgggttaaaaatacagaatgtgaggcagtggatactgtcttgcctctgagtccttttccagtgccgggtgttcttcattcccatcttcacccttttaactgttattacagggggattccatgaggagagggtaaacccttaaatttccgagtctggtactgttggtgttgggactctggaaacagagtctcaggaatgattatatggtcctcacatctttcacttagcaatgagtaagtctgtaacatgactttgaggtattgccaaaaagcagctacttctgttattcaaagtcagtgataccagtgaaagatttaaaaatcactttagagagaaggaaaggactcttttacaattaaatgcgttgtatttttaaatatattattccaagagacagtcaccctgtagtgttttccccctgatgggatagtgctcctaggctgagttagaatactcactcaggtgcttgtagatagatcttttctgaaaatatctgctatcaagcttttagatgaaacattcttctacccaggaaagcatagagtttttctagagaaatccgattttggagtgagctttaggagctcccagctgacattcactatatcataaaatagcttccagtatcaggaaaagcatgtgcgtccatgtggaatcacaagcactactccatttgtccacattgggccgtttaagttggattacacttaagaaaaattaaatggtctctctcctgtatttgcaaaactacatattacctggccttaggaacttgataaatagggaccaaggaataccatgttgccaccagtgtagcataggataacatctctattttgtattacatgaggacagaatggctgagtgtgtaccaggattacaacctcagaagtcttaactatagtgtaaccttcttattttagaaattaagacactgcaattcaggaaaagtaagttgcccatggttataatccaattagtggtcgatccaggaatgggattcttatgttctgcctctccaataaagcagacaaaaaagctcaaggtctgtaatggcatgataggggaaaagtgctctttaaggaattaaatctaggaaacacagagaaatacccaaacaaaacaaaactcgtcacacatcaaatgataagttagtgttattgtcacatgcctagttatatctttggagaaaagagatttatttctcttataatagttacaatttgagaaaaaagtgtgtgtgtgcgtgtgtgtgtgtgtataaagtatcaaactgcaaattggtcagatggaatttgtcacttttattactgccgttatccaatattatgaagaatcccatccatgtatgcaactctttatgataaaaaacaaatggatagtttccatttaactaatctaactgcccacttgttactagcagtcgactcccatattgacaaactccagcaatcacctgccttgattctctccttctacattgcctcactcctacaccatagatgcctggctgtctgaattataggtagaactgtcttaactatcttgaacaatgtgtcttggcttgctggctgagcctccactgccatccaggtctccagacccagtgggtagatctgctcttttcctgcttgcttcatttttctgtatgttgccatgccccgttagctaatagaatagaatgagtaatttgctgggaattacctaaaaagttcaagaggaagaagctctgactcccaggaagacctgggttaaatattggagtaggaataccttgaagatggtttgagataggattcttgataggaacaccttaaggatgacgattatatcaagagcggaaatcaagataagtttttactggatcacgagtgttccttagattggcaaaaaagaggaatctgctgtttgtttatatttttatttagcttataacctgatgtagtttttcaattaaactaataataactgagtaatcctgatttatctccaatctattcaattgatcaagaaatacacactgtctgctttgtgaccagaatactggaaagaaaatattcaggagaaaagactgcagacaatataaagaaacctcctgggggtggttttaactttcctaggtttaagtgaaagtgggaacacatttttcagtgagaagagagtacctttttatgcatgtccttgagggcaagaatcatgtctaaattatctttttatctgtagaaaggagaagagaagctggcacttagcaggtgcataataatgtttgctgaagaaatattgacaatctttctgggaaaatgtagagagtgagtaaattacctgattattttccacttaatgacatccttctcttttctccacttcctggcttaggctaccatgatggggaaatgtagtttggtaacactactggagtatgaaattcattttcctatggaagaaatgtttaaaacaacagtttagacattattaaatagacataataattattttccattagatgtaattgaaataataatgattagatataattgaaaactgttttgcagagaacaaatgtttctgtgggctatctaggaactcaaggcatatataatgtaatttctaggaacaagctttgtgttcaaaccttgagaacctcatcgtttttctaacttggcttgacatctaccttccattttttttccttttttcttaaaaagtaggcttttctactattctagatgttatgagtctgtggaagaaataacagataccaagagtggctttcactcagaataaaatgatatgtatcaaaaggtaccttttttttttttggtgtgtgctgcaggtgggttgggaagggggtgttctggatttatccagttggaaagaaaatacagaggcatattaagcagttaatgagaactagcttgtgtgattaatatagacaagaagtggcatagtgatcaaaagagaaagaaagtttaatgtagtttgccatttttagaaaaagcttcatagtcagtttgggatttcaggtaggtaggttttagggagatgaaagaaaagaaaataggtattttttaatctggaaatttttcaccagcccaggaaaataggatttgatgttcctcttagaagctctggtaactcgtccttaataaaaatttgatcatactgtattttgatttatctatctccttttatagatattcgagtaaaatgcttgaaggcaggaatgtgtagatgaatttaggcaatagttggagatgtttcacctttattctgaaaatgctgaagactaaaaatttttttatgaagaataaaaatacaactgtctggaaataagattggaggagaaaacatgaaggcagggagatagcaaatcctgttgattaaaataactcagataggagagaaaaaggggtggagcaatagagaatggaaggaatacctaaaatgtgttaacaaaggaaaaacaaaatgttttatactggatatgagaaatcggaaagaggagagggaaaagttaatagacgttcaaacatagattttaaaattttctgtccaaattagtgggtaaaacaccatagcatttgtacaactgccaaaactgtttttcaggtctaaataatttgcataattactgtcagcatttctttgttccttcgttattttccaactctatttgttgaccttgagaaaattagtttccgtagtctcatacgtcttccaatgtctgtgttttctagtggaaaaagaaaagggaattgaaaacgaagacagctacattacattttgtctgatattgaatcactggccatttaatctgctccttaaaactctctttgagtcattttttccactttgaaatgtagcttcatagattcaaggacttttagtagtaaaaaaaaaaaaaaatagaaaattatctaggagtttagatgccacatccaggacttgaaacaaacaaaaagaaaattatctaggagaaaaattagaaagtaatcacacatttgaagagatacagaaactgaggaccaagtaagttatatgatttgttgtgagtcctgttgtcagttaaggacagcatgaggcttaaaatctgagtgtgctgaccttcagccattgcttctgattgtataccatagtgatttgggtaagactacagataatcttccaaatgtttataattaagctaactgttacatcttgctacacagatatgtatgcctgcaggaaatttgaaggaaatctcatctagtttccacttaaatttagactgtgacacaaagggcaaattcacactttgagccacaactgcaaaataacctatattttttgaaactttctgttgaaataatgttctgtagatttcttgcatttctgtacatcttgcaagcagaggcacggactgtctttgttctagattatttttttccaagatgttggtatagcaagcagcacagagaagcaaaagtctggcatgcttactagccagtataatgaagacaaaggttccctctggagcaaagtacacacatacttattgcccactataaaagattcaggcttcctaaactcagggtttctctctggtacacagcctgctgaatgtgctggcatccatctagcctgtacacattactttaattgggagcagggaaactgacacaaatatgctgatgctaatgttacttgcagtggtgtataataatacagctctttgtttctgacctgggagtctcatatcttctgccacaatctatgagattgtagcaaactaacttgttaacttgcaagtaggataagatctcagctccttcacagttcaacactttctaggctgacagatttgtgggcccaggaaatactcttataattggttaggcataaataaaattggaaatgttgtaaatcaatggacataactaaatttttacttagatttctacagttttaattagaacagcttaaggtctaagtgtggcattaatattctgagtctcaactgattagatttgtgaaatactattatacttagttgctctcatcaatttcaatctttgtagcattaaatgtattattattgttatactctaaatgtttttgcaaattaacaggctggcaaaagttatttttttgacacttatgcaagataaactggcaagcagatactatatagtaatttgtatagtcaatgtgaccaaaatagaaggattgaccatactttggttcctaagtttttttgtgtaggacttgatgaaatttcttgaggaggattgtttttcctacttgaatttggatactctccaggtctgattatcagcacattatcaaggcccaagtcacaatttgttcttggtagttaagcaaattaaataattaaagtaggtattttctgttctagtgttactgtaagccagaaacatgaataaggcctaaatagaagagaacaagggaatttatcagttatataggttttgttaaggtccagcacaaatgatatccaatatttatgtaaatcagaactaaagactaaattctagactgcagtagcaggttgttaacaagttaataaactttcttccaactctattatgtgtttaatcattttcctagtatagagtttgaagctaacaaacaataattatgcttgcactacatgtgtccctttttagacattagttcaaattagttctaagttatgatatacttttgtttcatttttaagcttgttttttaattatcttttttttgtatagaatttaaggctgttacgaggtcatatagatgttacgtagaagaggaggggccaaggagagtgaaaagagagaggctaaagaaagttcaaaaaaagctgcactgtagtttaatatgaaagaattccggtgaattgattagacagtagctcacattcagaaagcaggatacgtgaaactcatctttgaagatcaacaaagacttttttttgagaagaaatagtagcgtttgacccagtaatatgtaatcatttcagaaattcattgataactgtttttttttaaatgaataaagggaatgcagaacattgcagttctggctagcagagtctgttcctttgggaaaagacccccttagtatagtacgcaaagtcagcctgtctgctttctctctctctggcctactttacttgctggccatctgtggcctagtacatttcccaagatggctccccttccatatgctcttcagcaatgtgacctttccacctacccctcaacaagaggtggcgtcgatttcttcaccccttgaatctggaagggccctgtgactgctttgaccaataaaatatggcagagcccttaattggacaggcacttgccatttcctggcctctgggaagccaactgtaataaaagaatgcaactatgttcaaaccaccatacagtgaaaacccaagccatgtggagaggccttgaagaatgaaatgccacatgggaagagagagagagcaacaagcaccaagaaatcaggtatgtgagtaaggatgccacagtaggagtagatcctccagcctgagctgccccagctgacaccacatgtatcagaatgaatcagccaggtgagcccttccttaatccccgactcacaaatttgagagaaaaatgaaattattttaagacagtaagtttatgaggtattttgtgaggtaataggtaattagaatgccaccattcctgactggatggtagttaaaagttagagaacactaaaaggtaataaacactttctgttgattttttcttttactaaatggaaggaattttagtggtcagtcattaattattaattcacaagagtgataagatagtaaactgacttcctttgccatctattttttttaatcataactatttaaagtctccttgaagtttttatgttcgtattatctttggtttccaccattcttgagattctttggcaaagggtaacattgtgaaaaacaggctcatctccaagttaatccttttttgccttcttctcctttgattccattatagaaacccctgatcttaacttggggtattttgcagcattttgcaaaacaacaataacaacaaaaaatcgttttctcttattcagctctctacttgtaatgcctgaaacatctgaaacatttctgcctcatagataatgatttacatattttttttttctcactctcagagcactgagcaattgctgggcctatgtgtttgctgaggagtgggggctcctgaattcattttagccgaaagacaccccactagaatatattaacactgaattaggaataagaaaactgagaatttagttcaaagtgcctaactgtatatgcaaccttgagtaggtaacatagcctagggggttccaattttcttacttactgagaggtaggagctggatacaatggtttctaagttaccttctaacattgggattctttgtcttcttgtaaattccatcactccatgggtacatatcttttaaaatatgatttacatttataatggacgtaaatatggaggccctaggttatttgttgactttttatcaatgggcccggagtttttcttttgttaaaagaaaaaaatttgcgataacttatttttaagctggtttaagatagaaaatgtttacagtaataaattaagttgcccctgaaaaaatatgtctttcaaggacacgacctgccccaatgtgctatttatttgcatttacaggaaaacccaattataacagctattttcaagaactaatatcactagagactgaatgtatagtagagcaagcagatgataatgcgtcctaaaaaactgacctagccgggagcatgtacatggtgagctcacccacattttgttattcttcagtgaaattctacgtttcatctaaaatattgttgctgatatttatgtaaaataagacatagttaatcactaggctaaatttaatatttgtctcaggtgaagtgaggtgttaaaattgtatgttatgatttccaaaagttctctttttagattgcacagggtaaattttgcaaccaaattacctctgtggtaaaccttatgttggactggtataaagcgaaaacaagcaggtccctaaacaattgctgctgctgctgctgctgctttaaaatccatctcagtgaaatcttgattgagctggttgcaattcaggaaggagacactccatatttacatcagacacaaagatctttcctcccttaatcattcactgaggggagtagttgtttagtggactcatttctctctggtcttttacaccttaagcaagaatttatggctccttaatttcaaatcatagcaggtaagatataatgccaccttttaaagctcatctgtgtgaagatgaccaaggtgtaaaggctacttagtgaggtggcatgagtcctgggtcctgtcttccctatgctaactaattgtggtaccttgagagcagtccctaatgtttttgggtcttgttccctcctttgtcaaatgaaatggatttcacaaatttttctttgagagcccttccccatgtgagacttttgtgatgatgaggtctctttctgtttaggcaagatgccttcccactgtcctcttcttgtttctcacttcctcctaggacttgtgaatataacatttttggtggtgacagactaatgcatctgtccacccctcatcatcatctctctacaggactgctgttatagactcttagatacctctcatcatatccattcgctgcttagttcccattcaataactctttataaggaatgctctttacaaaaacttcagattttatcatttcacttatttctttaaaccattaaatggctttgatggcttttaggtctaaatcccgaatccttaacatggcctgttgagctcttcactccctgcatctctggcatcttcccatgccccactctggtttaatttaaatgtgctgcaataagcacacatgatatattttactaaggaaccactggtaatatcaggctgaggatgttgctgggtgtggcttctcaaatctctccagctcttcatgggagatgggctcagtttggtggtcatggaattcttcttgcctaggcataagactggttcttctatctccaaacatattccctgaaacttcagaggaagtgtgttacatggttgcaaaatctgccctttttagccatatcaccagtatataacatcctagttttagggaaatattttccataagctaacagggccatcttactacatggttcacaaggtatgtaataatgattaggtatgacacatggatactatattagtttaggctgctgtaacagaatactatagactgggtggcttaaacaacaaacgtttatttctcataggtttgaggactggaatgttcaaggtcaaagtgcaggcagagtcagtgtctggtgagggcccaggtccactttctggtttgcagatgactgtcttctcattgtatcttcacatagctgagagacaaataatctttcttctgtttctccttaagggcacaaatctcattcatgagcagtccacgcttatgacctaattacctactctgatagttaattttatgtgtcaacttgactgggttaaggaatacccagatagctggtaaaacatgatttctgagtgtgtctgtgagaaagtttcttggaagagattagcgtttgaatcagtcaactgagtaaagaagattcaccctcaccgatgtgggctagcaccatctactccattgaaggcgcagatagaacaaaaagggagacgaaggatgaattctctgccttcttcagttggcacatccatctcttcctgccctcagacatcagtttccagttctaggccttcagactccagggcttacaccagcctctccaccctcaccctggttcttggagtctcaggcctttggcctcagcctgaattacaccacaagctttcttggttctccagcttgcaggtgttttattgtgggacttctcagcctctgcagtggtatgagccaatttccataataaatcccctcatctatttatcgctatatatcctgtttgttctatttctctagagaactctgactaatacacctcccaaaggccttgtcttccaacaccatcacattgggggtttgaatttcaacatgtaaattttgcagggacacaaatgttttgtcagtaacagatacctacgcgggacactgagagtctatggacaaacatgcttgctgatacttttaggcctaggatggagtcactactgcaggcctggctggaagctaccattcaactatgtgggcctcatctcagttctgccagtgtcatggtcttttccaccagagggcattctccagtgctgttgtttttgctcaaattattctttaactcccacttacaccttccttttcatttagataatttctatttacagctcagatcttctcagtttacaagccactttctctcagagacttttcttgttctttcagactaggtttggtgcccctgttttatgcttctgtaataccttatctcctacagagggtgttactgtatttctggttctatgaccatcactagctttagattgtaagctctgtaaggaaaaagattatctagttcatgccaaagccccagtaactagcatggggtccagcatatagtagtcagtgaccccccaaatatctgttggatgaataaaggaataaataaatttagaggagaaagacataggtgagaggaacaaaaggatctcaaggagggagaagaagtacttcttgctgatgctgatggtgtaactactaagaactgggagaaataaataaaaaaggcctcttgcctggcccatgatcctcactttagcttccaaggaggtggaactactaaatagagtccttccaggtcttctatggaaaagaagaagtatagactaacactaggacagacacttggcaattcagggagggcactggaggagagcagtccccaggcccagaagtagatctgaccccaactctgtgtacattccaacaaataccaggggctttaaaaaaaaaaaagagacagggtctcactatgttgctcaggctggtcttgaattcctgggcttaagtggtcttcctgctttgccctccccaaagcactgggattacaggcatgagccactgtgcctggttgaccagtggctttttcattgtgaattttgggaagctggattttctctttgttatctttatattccatatcttttccccactgataacaaaagtataaaaaagagagaaaaaagaattcttagggaatgtcaaaaaagtcatgtgtttgtttgtaagacaggcaggcattctgtgtttacattctcagtgagtcaagaagggagactaccatggtcagaacaatgacttttggcaacaaaaggacacaaaggatttattgaggaagagaggcaggaggaaaaggaaagtggacagaagctgctctgggattgtgattctatagatctggcaggcattcctttttgctacccacccctaataaacaatatttttctcctcatctcttctgatctccctgtaattccttttggttccctttcttaccagactagtgcctttaatacaggacataggatcaattttcaatagctaagaatgttggtgcaatgggagtatcgttcacataacagacatcctaaagtggaaatataactatgtattcccttaaaaacatgggtagatatggttagttaccataggctagctgttttcataaacaacaccataatctcagtgattaaactcgcatgagaaaaagttacttgtgtcctatgaggtttaataaaaaagggaataagaaggactctgctccacacagtaattcagggattcagcctttccccagtctttgctcttccaccttctaggttttgtctgcctgtgtattgagctagcacatgaatagagattactcatgggagggtttattaactaggcttcaacgtggcgtacacttccacctacattctacaggttagaactaaatctcaaggctgcaaccaactataagggaggatggaaaatataactgtactagtttcctagggttgccatagcaaagcactacaaactgggtggcttaaaataacagaactgtattctctcacagttatgaagactagaagtgcaaaaccacggagtcttcagggctatgttccttctgaaggctctggagaaggaccctcccctgcctcttcccagcttttagtggttgctggcaatcattggcatcccttgccttgtagctacatcactccaatttctgcctctgtctttgcatggccatcttctctctgtgtgtctctacatctagttttttctcctcttataaggacacctggtcattgggttagcccaccctagttcattatgacctcatcttaactggggcttgaacatatcttttagggggacacagttcaatccacaacagtagtctagctatgtgtccaaaaggaaaaaaaaatgctttggtgtcccctattggatctttgccaagttaagattttctaccataagtaatagtgagtgggaaagccttttgagggctttagagaactgagattttttaacatagtttctgtgaaaaaatgtttgtaacaacagacaactcttgactcacaaatggagataatctacctgtaagacatcaaggctttatacttcagagaactttacctcactcaaataatgttatgaatttaaatagtgtgttagagttcttaatactattaacactcatggtttaataaaatagaataggcatatgaaaattagaataatcacctctaaaactccatgcctataaaatatgcttaacaaaacaccaataaagacatcttcatatttctgcctgggtcattgtcatctgacagcggtttcttttcctggcattttccatcttagtctttgtccatcttatactttattaagtggctgcttttcattgaagccagctatgatttaataaaagaacaacagccttcaaatctgatgaacttaagctctatatcttattaactttcttactttggacaagtcaccaaacccactttttatttcagttttatcacctgtactgtggttgacactaaccttgtgtggttatgagaatcccgtaaagtcacttagtatttattgagtatctgtcatatgctggcactcttataggtacttgaattatatcaacgagaacaacaaagatctctgttctcatggagcttccattccaggagctaaaagggctttatgaattataaaatgcaaatgtaaggtattatcatcattgctattgtgcctgcagcaactcccttttctcaaatatctgtaaaaatcttatttaaaattatatatagctcttagatatcagaaagtacataaagggaaagaaaaatctaagaaataaaaaataatcttttagatgtctaattgtaaataaaaactcatagtaagtactgaaaatgtttctttactgtatttaaaaatagttcctagtcccctattatatgccatgcactgcagtaggctttatgtggcatgccaagatagatattaatcctgccctcaaggagcttagagtccagttagggacatgcccactggaaaatgtacattaggataggaagtgaagaatactcagcagacaggcacaaggaaattgacggaaagctttcagaagaggaaagatgactgcccaaacacttataacatcttgacattttctatagaaaatgtcagagagatatttacccccggtgttgtaattgatacaatactaccggcacctgtttaactactggctgggattttcattttatacagaatttagatgtttacatctatgttatactgtatagcatttgggcaatactttgtacaggaagtgcattgtatacaagtttaagtaatatttcagaatgacactgctatggcttgaatatttgtgtcctccaaaatcatgttgaaacttaacccccagtgtgatggtgttagggaactgggcctttaggaggtgattaagtcacgagggtagagccctcgtgaatgggataagtggccttataaaaggggtggagggaactaggtaggccctttttgcttttctttccttctgccatgtgaggagagtgttcaatatgccatctgggaagaagagacctggccctcaccagacagtgagcctgctggtgccttgatcttggaacttcccagcctcagaactgtgacaaataaatttctattatttataaattacctcgtctcaggtattttgttatagcagcaccaacacactaagatacacaagcagccagcagggtatagcagactgtcaaattgagaagccaaaatctgagaatttacaaccatgcactgtatgtttgaatgttgacagaggaggcattgttacaaaggctgtcagaacataatcagaagttactaattcataaactgttgaaatacgaagtatatttgttttcaatttgcattgcagaggtgatgtccaagcaatgattctattactaattgggctaccaaacacattgattgaaaaacgtgttctgacttcaactgacaaagaacattaacagcatctctctcctatagatccagttacgacaaaggttttccattttgcttcttcttttcatggtataatagtttcctcaacatttttgccaagaagttcccatctcgggacctttgaactgctattctgtttgcctagaatattcttccttcaggtaattgcttggcttggtccattcagatttctaaagagcattccttagcaccttgtgtgctaagcacagtaacatgtgtctctcatcactccttattctactttttttccccagagcatttgtcactattatttttgtttaccacctagttccactgttagaatgtaagcactatgactgcaaaaatgttttgtttatcatgatatccacagtagttagcacaatgtgcctctagtgctcagttcctggcacatgatagtcatccaataaatatttatcgagtaactgaatgtgtccaagctgaggctgctcccaagaaaggtcaagaaaggggcatctaatgggacgaggtgagggaatgagtgaggggttgggagagcaggtggttggggagtaggaaatggcatggggatttcagtgggggctgtgaccacagtgggagttgggcttctggaggcttctgtagaagctctttggggttttgttttaaaaaaaaagagagaacctttgcctctttggcctggctgtgtgatccaagataccactgaagcaatggtgagagaatggcattggtggaatgggtctgctgaaacaggaggagggtggagggagtgaggggcagcaaaacagagttgactccagatgatgacgtggaggggccttagggtggtaaggcagagagaaggagcaatcctaacagcaatggggaaataggtgaatttttgttgctctgtctgatggaaaggtgagttctcaactgctgcagtcattttcacataaatatgtttcttaaggtacactttcagagttgaaaactgtctatatttgtaataataataagattagcaatagcaacacatttacataggcaccttccaatttcaaagtgcatttatatacactatctcgttggtttaatccttactctatttttacttctaagtatgctgtgtattatactttacgttcattgtctgggaataagggcaagtgtttagaatatacatatgtgcatttgtacaaagtatattaggttctggttgcatctacaagtgtgtatatatatatatatatatatatatatattttttttttttttttttttttttttttttttcaaggcggagtcttgctctgtcaccgaggctggagtgcactgggggcaatcttggctcactgcaaccttcgcctcccgagttcaagcaattctcctgccccagcctccccacacctggctaattttttttttttttttgtatttttagtagaggcagggtttcatcacgttggccaggctgttgtcgagctcctcaccttgcgatccacctgccttggcctcccaaaatgctgggattataggcatgagccactgcgcccagcctacaagttaatatttttaaatatacaagtatggccaccttaatcaataagtgaatttgggtttcttgttataaaaacaagccccatttttttaaaatcaagaagaattccagaactttatagtatacaccccttgagaggagggattgtgttttattcatcagtcaatagacacaattaggttaagaaaacttttgagataagttataaaatattgcaactccattagttttttatgtttttattactgatagtgtcttagatatttaacaagccttgattaactgcctttaatgtgccatggattatgcttggttctgggaaattcagttctccccctacccagacacacacacacacacacacacacacacacacacacacacacacacactcctgatctaaagctcttggcctatcaagaaaagatggttaggtatctgggcagttgtgtaatacattgtcacaggtatactgtcagaagcttacattggaaagagaaggcacaggagaagagagtggttggggttatctggaggttggagaagctgttctcaaggctttatgacagaagtcatccttgagtgtagtttcaaaagattatattttaaaccaagtgaatgacatctgaaaaacatagctttcttatattcactttaggatattaataaccaatccttttccttaagtagcctcttgactggctaaatgtacctcttcaggttcagagacacattctagaatgttacagttttctcattatgcattgtatctgttccgtgttgaagtacctgtaggaagaaaattaagtacaggttttgtgtgtaggttgagagctgatcctatcaagggtgtgtcagaaaccaaccagcagagtccccaaatcattcgagtccctggcattcttttttcaaggctttcttcattgtaaccggttcctgatggtaattggttgaatcagatttaacaatgcagtcagataaacagttgtggcagctgctgccatggcaacgtcaccgtccttaccctcccagtgcgcgccccttccccacccctcctcctcctcctgctttcctccagtaagtgcatacccgctagtggtctgtacaggcggcacggtttgatggcagagatattttctttccaaactgttcaaaatgatgaacgaagatgcagctcagaaaagcgacagtggagagaagttcaacggcagtagtcagaggagaaaaagacccaagaaggtaaatcgccggaattaggaatgtctgtgtataaatatgtatgtgtgtgcatgtgtgagtgtgtaatatcagcaaggctatggaaaccgtggagcattatgagtaactgtagacgataacagtgccaagccttgctttttaaagaggcaggtgcaaactgctgctttttgagaatagtaaaggagccatggctcataatggatacactgactggagcatggtgaagtgaatagagataaggtgtgttccacatgtggattactgaggaccgtggccactgatggattcttctggtgttaactgggtagagagagtcgttttatttttagtgtgtaaaaggaagagtgttaagcaacgtggattgtgaagcaaaaggcagatttttggccagatgcgtttgctctatgatgatcctgagatggctagacagcaaaagccttttggtttcatgctaagtgtattcctcctaaggagaaaagactgctgtgacaggagaaatatcatccccagcatgatatttctttggcttgcttagctcctctgcagttttcccagacattagtgtgatagctctttcaataataagaaaaacagctaaagatgttatggggtgggggctcttgggcacacaaagcagtctgtaggatttcttactgtggcatacattcccacaccctcgattttcatggaaatgatagcagcgagaaacagtgggaaaagatgcaaactattcagccccacccaatgccagcacttctttctttatggcctgactccttctggtaaactgttgcagcctcacagagcttccctgagcctcacctctgaaagagatgctctataaataaattctcctaaaatgcatttatttcctggagcaataatatgggcaggatattagatatgattgtaatgtaaatggctttcaacattagatggttttggattttgaataagcagattgcaaaaaataataagcatgaacaaatgaatatttttcattttgctaatgaagttgcattgtgtttcaaaattctagatgtctagtgtactaaatgttttataatctaaagattgtaaataatttgcaacctctgatatttaaaagatcactgtatcagcaaacaagggagtagtatatttgtatggtatcatgcaatttgatagaaataagcatgtgatgatttttaatcatagcgtagagatagtgatacaatctgataacaggcaaaaggataattcagggcaagcaggaacattggtagaatgtccttttccttttgtacctaagcattccagatctagaccttgagggcatttttatagagtgttagctaattgaacaacataaaaaaagaaaaagaaaatagaagagagagcgcgagcaagcaagagagagggaaaaagaaagaaaaaaaggaatttttgttttaattcacattatcatttcaaaatcccgtattttctctctaaagtccctgtggtgctttagaaacaatatactcaggactattaaaggggtggagaatgaatcttgagatttttgagctctgaatgatgatactaacttcacatgaccaaagccattttaaagtctttgaggaggtagagacaacgaaatcatcctatgtaataactatcatatctttaagctgaattttctcaaataaatttattttaggagtaagtctttttccaaacttgcatccaaaatgaaagagcaagttttgaatgtgtgtgtcagagcaccatgaatattgagtgttaaaaggagtttcacctaaaagaaattgcttttgaaaaaaatgctaattacataatagattaggggacgcacacacataaacacacacatacacatccctcagcttgcctagtcagtcagacataagtgggtctgaatctcagttctaccctttaattttgtgtgtttggagcacatcatttaatttctcatttaatgaatccagggattcatctgtaaaatgagaataattatatatagaatattttatgaggattagaaataatgtatatatgattatttgaacagtatttaaaacatatagtcaatggcaataactttcaggtgttattctcttaaatggaatttgtttattgcaataagccttttaagagaaaaatctgtttatacttttgagagaggcagaaatgacagaatccaatattggtgctttgcaaaggctagtagtcatttttcaaaatgtcaaaagttatatgctataattggaaacttttttatctcaaaaaatcattgagatttacataaatgtaccttaggtctttatattattgtttcacattattttgcacagcaagaaacttacattttcatatttaaacactagaccattaaatgtgccttgatgaggacattaatgataaagagataagtatccctaataagcataaaagctgagaaagcaaaaattggagtaaagtcaatgtcacatcacttcaattcggttgtttgtttttctactagaggtttacattgaatctgctgtgggattctacttaagcatccaggactacggaccaccaagctcactatggcctgggtgtggatctatcctactgaatcatattccttgaaatcatgcgtctatctctagtaaatacgtaacagatgggctgtaatttacttgtttattctgtaccttccaaaagtacctcttctgagggacagagctaaagggtcttttgccaccagacctacaatgtgagaaaacaagctcaaggaggaatttatttatgtcaaaattttactgagtgtgttgagaatagaaattctttgagctttacttaaggttgtctattttggcttcagtaagggagcttgtcggtgctctccactcagaaaccacaaggagtacactggtggttgaacatgatgggtttatgactcattgccgcgaggaggatacacatcatggggaaccgtgggggcatctcagtaaacgggtgccaggaagaatgcacaggatacgggcttcagttgagtaatttgaaagagggttcaagagactggtggctcactctggggatggggtactcccagaaagcaggaacaattctacgattgtgtatcccagtaagtcttatctacaggagaacaggctagagcgttactaaagctatagttgtaaggaggcagtaatctcatttggcaagagagggagatgtttggtattttgtgtcttggacaacgtctttgttttgtctgtgttcagacatgatatgggagtggtgttgttttggttttactctgtcatggtcagagtggccttgtctgatgctgatgctttgagaaattttttatgttcaataggagaacactgaggcctagctgatagtaccaggccccctcctgtgggtcagtggctgcctttctcattctccagcttgaacacaaagatacctttggagagagagagaaagacttgtttattattggatactctttagtacccaaagaaaataaattgtaggtagtaatgttgttaaagtagtcatgaaaaccttcatctgatacttccaacaaagttttcttagggccaagatatttcatactaacagatattgcccaaggtgcagatttgggattgatgttctagtggtggttcagtggcgaagaggaaatgggggctattctaattctcaactggaatccaggactaaaaagaagcattggtagctatgtgaaatgtatccgtgtaagacagctttgagcctactctaaatcccagacaactctataaagatttttatattttttgaggcagggtcttattctgtcacccaggctggagtacagtggtgtgatcatggctcactgcagcatcaacccacctggctcaagcgatcttcctgcctcagcctcccttgtagctgggactgcaggcatgtgccaccacagctggctatttttgtttttttaactttttgtagagacagtctccctaaggaacccaggctggtcttgaactcctggtctcaagcaattctctctcatcctctcaaaatgctggcattacaggcatgagactataaaacttattccactattccactattttgacagattagattaaaataatccaagaccatatttttgtgtgcagctccacacactttccaattttgtagcaataacatagcagtggatttatactaaaagaggctgtaggagattttggtaatttacataattggaaatgggaatgcccaagcatcaatcacaggtgacagccatctgaaaccactaggcttgtgagttcttctaaaacaagtacatgagtaaatggtttactaactgtttttcccatttagtggaataatgatatgaagataaaaataaaatatcagcaccattattttcaacagagtagtaggataaaatggctttataggataccttatatttattgaagatgctttgatctggatcactaagatattcataagcattgcaaaatattttgaaggtacacacacacacacacacatatttaatggctgtttaggccactgcctaaatagagagatgaaggaggaaagtgttgccagatgtgtggttaaaatgttgtaccatagaaatgtgaatgaggtacatattaaaaggtttatttttatagcagccaaagaaactatgccctttttagtgaaatcaggtagtagatccaacatttgggtgtccaaatagtattggagtcaattaattttgaatttaaagttgatgccttatctagttcactgatatctagacaggcttccatgtataatttattctgaataatatccctatttcttcagtctttcaaataacttaccatttgccctttataaaataccaacttataacccaaaatagcatgtgttgcctgaagacagtaattccccatcactgaaggtatttaaaatgaccatctgtcagggatgatggaaatttttattggaaagaaaaataccttataacctggtattctgtgattttctttcaatgtcttcctctctgtttctatttactcacttttatgatattaattttttcactgataatttcatgtcttagtaataactaatttatcctttttagagcagcatatttcaaagtgctgtctgctgacctcaactaccagaattacctgggttgtctgctaaaataattcacttcttaggacccacttcagacctgctgtgtatcagaacctttgaggatttttaacaggctcccaactctttcttatgcatactcaagtttagaaccattgtcttagccaggtgcagtggctcacacctgtaaccccagcactttgggaggctgaggcaggaggattgcttgaccccaggagtttgagaccagcctaggcaagatagcaagaccctgtatctaaaaaaataaataaaaataaaaaattagccaggcatggttgtacatgccagtagtcccagctactggggactgctggggacacccaacccccgagggtgaggtcatagtaagccatgatcttgccactgcactccagcctgcatgacacagtgagactgtctaaataaataaataaatgaataaatagatagataaataaataaatgaatggaaccattgccttagaatgtggtcaacagtcatgaagttgagttatcttagaaagaagaatctttaattttgattagatgtgttagtttattacttggctcttacagtaacatttgtttaagtctagatggcagcagcaatgacacaagaaaattgagaacaacatttcttttaatcttactcttatgtctggaatctagaactgctttcacatgctatcttatttgatcttcagaataactctcattgcatattattatcccagtttcatagatgagaaactggagactcagagactacatacagatggtgctgaagagaccatagacatttttcctactgttcaactaataacatattttgagccatttctcctgtggaaaccaggtgtaaggtagtcttctgtgtctcttgcaaagattctgtggttatcttctaagatatcctcctgattcttccttccagtgttgctgccattttgcgtcagttgatcacatttccaaaaatgctcactcttatctatgggaataacatggaaaagtaacttctttcatggctatctatgatactctcccaagcagcattcccaaaagaagggaaacttcttttgcttccattatgttttgtgctatgttgttgtagatgtatccatcagtccatgtagacaacatgttggactttgaaaattcacaaaaatgtaagaaacaaaacttaagtaaacagctgccttcatgtggcttaggcatgttaaattaagccaccataaaaagttcaccctactttcaccattttagctctaattattctcttgagaaaattttgttagtatgatattctcagtagttgttctattaaaagttcttttccatacactcttttctgaagtgttggaggtttctttttccttcttgataaagtttctaaagagacatttgattgcacattaaaatagacttgaaattttaatctgtatttgtttctgtcttgtcctgattcagagcatgctaaattataaatatgcttacagctttacttctgtcttgcttgtactctgttctaattcctgttggaggcagaaacaaaatcactgcctatttttatctcattggacactggtcggatacatcacaacaaataaagttaccatttcaatttccttttactagatagagcagagatgggattgctacccagggagacaatcttttgatagaaaaagtttaaatttttatgtactcgagaccaaataaatatgatagagtatttctttttctttgaaattcatgcctacatcccaacccgtagggagggtcatttttaaaaagctgcagggagaagggaaaatatgttctagataataatataccacagtctacagggtgagcatcttcttagtcatgagacctggtttttattcatgtttttctgttaactcacagacaactatcatcttcttccacacactaatttgtgtttgtagtcattaagacaaagaccttgatttctagcatttgcttaatgaaattcagtttctaagaatcagcttgttttgctcagtttaatttaggtgtttcttccgaacacatgggaaagttcccccaattcaacaattggtattggtttgctgagtgtatagcactgtgttaggtgctatggcatggctaggctaaaagccaatgattgacacttacatggaattcataatctgagcagacatttctatctaagaaaaaagtaatgagcaatctacagaaatattataggtatactcacacatattataagtaaaatataaatatgttgtgcaattgccaaaaagaaactctacaggattctgtagaagggcaagagatcagtgtaattttgttagaagagtaaaccctatgagtgggtgaacagtagtacagagccgtaagttatggctaatgtgtgagtataaaggaaggggatacacaggcattctggatgcaacagcctcaggcatataattccaaattacagtaaagattaggaaactgttgagtgatttgttgcagtgcagagccataaccattgtgagtggactctgacatggttgtccttgtgctttcagccttagccagctgcagcttgcattttggaatccatcttgttttgatgactgagcctgtgtccttctcctattatatatatatatgtttaatcactcattttacctgtgaaaatttgccccatatctctgtttatagattatttctgcaatcagtagtaaattccaataagtaagcctccaaattaacaagacattcgaatctagtagggacaatttttgaaagtatctaaatattcagccttctgcctttacctgaaagagatgctggtatggataacccaggattgcaattatctataacacttatacaggcactcataatactttgcatagcagctaaaaactggtttgtccctttgggtttttattttattggtgatcataatgttatgctagtataacattactaaggtagtccactttgcaggctgactttgagtttgctctggatcttctgttggattttcagatccttgaacaagaaatttgagactttcccctcctttccatttcctggtctggccacaggtttctgtgcagtcttctttgtccattttaactggcaaacagagtgactcatgaccaaccatttcacttctggccacctttcacatcctacttacaaaataagcacaattatagccagtgccacttcaaagaacacacatagttaaaggaataaaggggtgtttttgaaataaaactatagaaacagagctaagtgttagggtctgtgtcgatactaaaaatgggaagaaattaaaaagaaattgtgaaccattctagaatgtttcacccagtgctagtaagtggtacctttttataagtattttaatgtaataatataatggttactgtaattctaatatttgacaacattcttaataataagtatttctatgtggccaattgagcccagtttaggtgggaggtattctagtttaaaaaaaatgaaaacttaaattcaaaacattaggagaactatatatgagaaatttagtattttctatgtcaagattttggtcctctttttgtataatgcttatccctaaagaatccctttttcagatgttctaaatgcttgcccagaattcagagggtatggtggcgggatgcctttctctcttactccatagcactgtcttgtaataagtgcagaggggtggcaatacacccaatggccaataatttaaaatgaaaatcaggaaggaaagaaattagaataagtatagatactttccattattttagtagtttagagatgccattagaactgctagagatattcatactgctattaaattaatgtgaatgtctgtcttagtacttttgggctgatataacaaagtaccttagagtgagtagtttaaaaacaacagaaatttatttctcacagttctggaggctaggaaattgaagatcaagccatcagctgatttggtgtctgatgaaggccccatttcctggttcacagatgatgccttctctctgtgccttcacatggtggaaaaggcaagacagccttctggggcgtcttttatatgggcactaattccattcatgaagactctgccctcattgccaaatcaccttccaaaggcctcagctcctaaagccattgcattggtgattagatttcgacttagggatcttgaggaagacacaaacattcagattacagcagtctgctttaatgttctcccattcagttaaacttgtattagattgtgtatagcctggcatgcttaaatagtattttctgtaaagttgacacagtaaatactttcagtgttctgtgaagtcagtcaaattcagaagactagccctacatatgaatttgatctatgtatatgttgttgccatgaactatagtacatatgtttaataattgtctacgtgatttattcttggcttgatctaccacatattatcatttgtgtagaaaaggtgttcaaaagagactgtataaatagcctataaacatcagttctgttcaatgtgaagaggaaagagttatcataatggttcatacggcattcttataggtcattcctctgtcccaataaagtacagagactgtactttgagaattcagaaattggcaacactttccacacagtctatgattcatagtagggactatgaagagccttaatgtgaattagccatttgtttccataattttagattattctgaaaagagcatttaaatagcattgataaaatgttcatgagtaacacattactatactccaagactcagaataagttcatatactgaggtttggggatgagtggtgactggattttggtttgaatgcttagctatttagggcatagtgctaatctagccaccaatatcccataagagccagttatcttcatttagtgtcaaaggcatacacttcattcttaactgaagagagtagctgatcaaactgacacagcaaagcagagtactgccagatgtgtgcacacccaactacgttaccaaaattaacacactgcgattatcccagagtcacttatctcctaatgtgtgaaggaattctggtcctttttagaaggtcatatgaggggaaatgatactaatagaatgacagtcaaataggggtcttctgtggcattgtgatgaagtctacctcaatcaaacccgtttgaacacatgatgttttgttaaataaatggaacaatttatttatagaaaaattatttattagaaaaaatagttcatcccattggaattgcatttttcaatgataataataaatagtagttaatattcattgagagattagtatatctacatgccagtctacatagagttctacatagattatctaattttatcttcacaataacgtgatgagtagatagtttatgattccatattaaagatgacactgatgtccagatgggtttaaaaaaacccttcctgcttgaatctacatagctcctaaacgagctatcccaggtcaaactgaccactctgcttatctccaaacccctgtgctatgtgaatacaacaatcttttacacaattcaaataggattaagaattaaagaaataggagttttgtttatgtcccaaacctgtttcactcatatgccttcgctgattggtcaattggtcaatgaatctaaaaagcttttttttttttttttttttttcccaaatacggtttaaaacagaagtataaatccaaattagaaaagtttttttatgtagttgttgactaagattattagatgctttcagaatattcaagccagatgtgaattctcagactcagctgtggaacactgaagaatgaagctttatagttggtatttccatctgcacttcaactgtatttgtcaaatggctgacacccttagcatagcctctctaatataagggggaatttgttagtgagttcatgttgcttgtcctaattcaaaaggtcactaatctatcatgtgctccataatctcattacacagcagggacctctttccagttgttaaagaaccagtaggactgattggcctattacatggggcagtcaggcatttgtttactggcccatctagaaactggtgctttaaactgtttttttggatgggtaggaggtctgttccatctggaaccttggtacctcttccagatgaccctgccccaagtggcttccatgtttgatttgtgaaggtagttcttgagcactagcaacaggttaggtgtggttggggaacttacacttactgtaacaaaacgccttgatcagataaaaaattactgttggaataattttctgaatcactgaccctcatccagtgggagactaaagctcctcccctgattgctttttcccagtaataatttaaatggatgactatttttggtaacctttatttatagtttgtcaaaatgagcagaatattagctaaaggaagtatgttttcctttgtggagcaattaatttttcgtttcaaaaaggctgtcaggagataatttttgtaggttgcttatataacaacatcaataatttaaaaaaattacatacacacgtacacacgcacttacattattctgagttttagatatgaggctcttggaaatggcttataaactttggggattttttaaaaaagataaactgccataaccatactccaatttatatttgcctggatatttgaagtatcttcaataatactgctgttgtttaatgcgcacaaaaaaataattaaaaagaatgaataggatgtagtattagctagtaaaacagaatgactatagtaaaaaataatgtaattgtacatttaaaaataactgaaagagtataattggattgtttgtagcacaaaggataaatgcttgaagtgatagataccctgtttaccctgatgtgattattatgcattgcatgcctgtatcaaaatatcttatgtaacccataaacatatacacttattatgtacccacacaaattaaaaattaaaaaaattttgaaaagcaactaaaaaaaaattgctgttgccatagaaagttttttattatacactgtcttcattctaaaaacctaaggccatgccctgtacagggtttggattcttgtctaaagcagaattattaatttagaagccataaattaaatttccaaacattcaaacaggcttctttctccccagggtagatttttaactctctatgtcaggatctattggcagttttttgttccaactcaggtgtcaagggtcatgtggagaccatcatgatatggcctaatctataatttaagtatcatgtacatttcagtttaatattttaaaatgaaagtaataataatgtgcattttagaatttttactgcttgaattggtgtctcaagtttatttcaaggtgaccaatgaacaatgattttggatctcattaaattcttaaattttctggctgtatagctctttgtatatttctgtatgactacatatcactcttttatagtatattcatataagattttctgcacttttttgtaccatccagaagagccatattgtaggtagaggttattatatactttatgaattgcagaagtaaacagttttgaataattcaatacactaagaatatatggttccacatggacctcctagaacatttttgacaccaataattacatcacaggagtgattaatacttacgcagatatggctggctaggtctttcagtatactgaatgtttactgtatgtgagaatgatcccttgcaccttttcaagcacagctgtctagtaaacatttattgactatttgtccaataggctatgtagctctgatatttgataataggattaatattttgccttttctgtctacattactgtactaatttgattattttccctgggcctatcatgatgacaaggaattatgtctgttgaccttaaaatgaccttgaggaaatgaggtgctaatatcaatttaggtgacagatgataagtgcctgtgttatagctgactgaaaattcatgttccacagcgtaatatctatttggaatctaaaattctaaagttgaatatgacatttagtaaaaagatatccagtagaatatatattcatatctctgtgtgtgtatgagtgtgtgtatttgagccaaatattctctttgggtgttgctaaataatggaaaaagttaccaccaaatttgttatgtgttttaaatgatagcatttggttatcatttattaagggctctcaaatcatacctgcagccaacattgtggataagagaatacttggtaacaatcattattaaaataagaaattcttggaaaggtggatttcagcattgctttctcagaaaacatatggtacttgaatttgccttcttctctgtgtctagtcaaggtttgcatttctttaatgatgtgcatttgcccttttccactataaaaagaattgctttttgccacaatcagaaaacatttagtatattttatgtggacactttctcagttggtagaagacggaagaccaaataagcttataaatagtaatacacatgcatgataatagtaacagattattttagtctgctggcagttataggtaggtatttttatacttaatttgaaaaatacttgagaattaacagcaaatgtaaaattcaaagagctgaattatgaaaaatgatattttatctcatacaaatacatttttaaattctaagataatgaaactgaactcttagtgtgagtttagaagtgaggctgaaaacagatctcaggactatttttagtagactttgtttaaattcttgctaatgtccaactaaatacatttgaagttatttagattgcaataaaaaaaaccaccttcctgcttctttatttcatttgatgtctcaaatcccacattatttatggaaagctgattttaaaataatgttttatttttgagttgacgtaaaacatcaaactgaaatttgatttttccataaacataaaaagacatttttttgttgttgttgtgtttgctttttaacagatatgtataaatgactctcctcccagtggaagtcatttttggaaattttagtgatacagtccagtttaattgctgaattgtttacaggtgttaaagatttctagcattgatagtagagaaatttttcctcattaatttttctttttaggaatttgaagccctttagaatataacataaatacattttgcttcaagtttaatagcagaaaaagatcccttccacctacctcatcatctctgtgtacactaagctctcccaagagcactctgtgtgacttaccgtgatgacaggtttttgtgtctgttttaatcgtatttaccatacgcaggtgccaattgttctgtgagcatacacataacagcaggtggtgccagtcaggattcagccaggattaaggaggaggggctctgcattccacagtgcacatagccaccttttgttttcccatgacagaaatccccttccctccccacctgccagccctgcttatccacctcactctaggagctcaatttgtggtggtgtgctttgtgaaaaagtaccaaccacccttacgtcaagaaagtccaaacgattgtgcaaagtatggcccgtgttgttctttgggaagtcaattttaacttttaagatcgttgtcatgaaatgacagttaattttcttgttagaaagttctgtagaacttctaacaaaaatgttagaaagttctgtagaacttctaacaaaaatgttagaaagttctgtagaacttctaacaaaaatgttagaaagttctgtagaacttctaacaaaaatgttagaaagttctgtagaacttctaacaaaaatgttagaaagttctgtagaacttctaacaaaaatgttagaaagttctgtagaacttctaacaaaaatgttagaaagttctgtagaacttctaacaaaaatgttagaaagttctgtagaacttctaacaaaaatgttagaaagttctgtagaacttctaacaaaaatgttagaaagttctgtagaacttctaacaaaaatgttagaaagttctgtagaacttctaacaaaaatgttagaaagttctgtagaacttctaacaaaaatgttagaaagttctgtagaacttctaacaaaaatgttagaaagttctgtagaacttctaacaaaaatgttagaaagttctgtagaacttctaacaaaaatgttagagttgaaatttaaacaaatacagcacctctcaaattctacaggaacatatagatatcacctatatgtgtataataaatataatatttttgttattgcaaaatcagtatatatgtgagtgctctcttttgtgtgtgtatgcatgcaagtgactttaatgtgtgattcatactaatttcattttttagagcataaacttttagagctgaaagcttgaaatttccagttctaactgtcttattccatataaggaaatggagacccaaagaagtcaagcaccttggccagaatcatgtacgtagttagtggcagacacgggcctagaactcatgttacttgattcctagaaaagtgtttttcctgtttcttacaggtcatctgaaagagcaatcaaaactagcaatgggagagagaatttcagtgttgattttgggagaggtatagctttagcaaagcccctgatctactgcatgaaggagacttgtgattaacttggcagtgagcacaagccatgtttctaacatcaagtggggtactgagcttctatctacaacgttattacacaaaagctaatttcccaatatttactaatcaattgcttcatgagaacttgtcgtaccggtgctcccaaactaggtctgttgttcagctgtgatttgtggatggggcactattttactatagtcactactctggtgtccccaggaaattagatggcttcacctggttcaggtatatattttataatactttaagaccatctttaattagaactaaaacaaaaaaagtagttgaaataaaaatattatgaggaaacaatatttgggtttgttgaaccattaacacatatgtcctctaaaggtgtttggtttaacagtgtgtgtagttttattttttagtctctttctaccttgattcaagtaccctcccctcctccccccagccccacaaaacacacaggcgtgcacgtgagcgtgctcttaggcctcttacagtttttgcaagccgaccacaggggctggactcattctgtaagtgtttgaagttcaattactatggtactcttattacgaagggttactggtggggtgccttttattcatctatgtatttatttattcttcacttagcacatttattgaatgccttttaatgaccagacaccgtgccaaatacaagatacaaaaatgacagagacatattccttggtctcaagaagttcacggttcataaaggcaaacaaatacataaatagatgattactatgtgagatgataactgtgatatggaaacatacatagcctatcacaggagcacagaaaaggctaggcaagagctcctgcaagctatgatgactgagctgagctttaaagaataaataggagtgagccaggcacaggtgtgactgacagtacttctgggagaaagtggagtctgagccatctcatgaggtggtgaaagcagccctgcacatccagtgaagaagggcaaactgagtagagcgtggactctggaacgggaccacctgctctgctgcatgcaaggtgtgtatgcatgtaactttgggcaagtaactgagcttctctgtgtctcagctgcctcatctgtaaacactgagataattacaggaccacctaatagggtttctgtgacaattgtgagctagcatacataaagtgcttagaatagggcttggcgatagtaagcattatgtgagtgttttgttgctagtttgtgaagtgaaaaacaagcaggacaggtgagaaatgaggctggaggcattggcaggtgtaagatgactgtatctcatgtttatgagcttggactttatgctatgtagccagaggggactttgaaaggcttaaaaaagtgggaaaacatggcgagatgtttttttgtcactctggagactgcagcgaatgggaaaatctggagacagattttacccagggagctgtagtgctagggagacatgatatggaaatgaactaagatgtagcagtatgtgtaggaagaatagggaaattagtctgctcaggccactgaggggacatgggagtgaaatggagggggcggaggggaaacaagagtccaagatggccccttggtgtgtagtgctggtgatttggtggctggtggtactagcaactgacctagctaatggtaaaggaggagcaggtacagaggggaagatactgggtccagattttcacatgtaggtcctaaagtttctgatggaaaagtccagcaagcatttgaagtgtaacacttgggaggaaggtcaggacagatagagttttaggaaccatcagcatggtgaggttgaaatcacgagtaataaaatccctcataggtggaggacagagtcttggaatgacatctacagttacagcgaaagctaagaagaggtcttcaggttggaggcaaagaaggtagaagagctcctgggaggactggaaaaagaacatgctcatgtttttgcccccagagatgatttcctcacacatgtgtgccaatattagattttaagaagtattcttcttaggttgcactttacatatgtggccccaagcatgagtctaaagttgctagtgttccaaaacttcaggcaggccacatggccaaggtgaaaataactagtcacatgtttctctctggttaggtggagcaagcttactcttgctaatactgatcacacagtcactatgttcccggagccactcagtaatgctggcatttttcctaaggatgctcttaaaagtctatttatctagttcctgggatcatttggatagccattcccaaagaaagccaaaacatagcatctctctctatggcatttttatttctttctcattagtttccccctgagtgttggaaagatgtaggttgatagccacatctttgcaacaatcactattgccttgatgagcacataagtttttcctgcccttatgagtgaatttcttctacacaatgaaacaattgtggagatacacaaaaatggaaacaattagttttgtctaaacttgctgtgctgcatataagtgatgatataaattatgaagatagtgactttgttaagtttaaatgatttggatactggaagtccttggaggatctttaagcgtatgttacccttgtttgcttgtaccattgaatatgttgtgaatgtcatacaaactcacatcccatacaaactttggaaaatttcaactttaaaacatataatgaaaagcaaataaaaatacctaacaccatttgaatacttgattagaaaattgtacagcgaagcacttaaatgtaatttttagattacagatgtaaagttgatatcacataaggataaagagaatgattagaaatgactcacatgattgtatgtttgcattacagagagaaatgacatggctaagagtcaaaaactgtagacaataaagataataaactgccactttaggtttagggaaacaaaaaaggtatgaagtcaaataagagatgttagacggaacagattaaggaagttagagctgggcatggtggctcatgcctataatctcagcactttgggaggctgaggcaagaggatcgcttgagcccaggagtttgagacaagcctgggcaacatagtgagaccctcatctgtacaaaaagttttcaaaattagctaggcgtggtggtgcatgcctatagtcccagctacttgggaagctgaagtgggaggattgcttgagcctgggaggttgaggctgcagtgagccatgatagggctactgcactgggcaacacagcgagaccctgtctaatgaaaagaaaagaaaagaagagaaaagaaaagaaaagagaggagaggagagaattagaaatgaggatcaaagtcctggaagtaaaaggtgaggtaagcacagaagagattctgtagaacaaggagagagctgctgggcaggtaatcagtgaggagaggagaacgcacaaggtcagagagaaatgaagagaagaacatttatgccctaattagtgagcaatttgttataaaacagctttgccacctggagagtagaatttaaaaatttattggcacgaactaccaaatcagccaaattagagcaggccatcttccaggtctccagcacaggctacagtggacagtgtgcaatagcaacccttgtcatgaaggcggagagaagaggaagtgtacttcaggaaagcacgggctaatccaatcaacgaagatcagcataaggtcataagagttccatgttgcaatcagtcttttaaaagccaaaattaccttttgcctttggcactgctatctgataccttaaatggagtattttgctaccaaatgaaactaaataggacaagaaagagctgctcatctctttattgcaccatcattgatactaaacttttccacaaaagggtaatgtttctctttaacctcaggggcacatgtgagtcattgctctttcagatcctaactatccagtgatatctattaagtcaccacttgtacctttaacacagtttctattcagtcctcctggcctcccgcaaggactgcattagtctagtcaaccagtagtgctgctgccgaagttacctattcttcatgcttgactctaagaacctcttcctttctttcttcttgttttctaggcatagggatttccagctttacaacatgctatgaattatcctcctctgtgttaacacttgtgttaacctcatccgaagtcctgggggatgtcctgttcaacctgccatttcacccatagtagagttggtccacagtgaaaagtggtgaaaagactgaagtctttataccacttgcatatattgttcctgatcctgcgtgtacatttcagagaactggtgaataaactctccgctccatgcctttctgctcagagaggttacatcttatattctccaaatttaaattaaaatgtagcttccttcatttgcttctcttgtttcttggtatattttcccttcttctagacaaagttgatcagctttttatttttttattttttgtactctactgagatctattcctagaatgccagcattgtccacctttatcattaaaaaaaagtctgcatcatgaaactatgagtcctaattagaagggtagtggtgattttctaaccaaaaattacttggcataatttactctgggattaataagtataaatgcattgtcccatctttgaaatttttcttttacttctgactagacatggcaactctgagtttgaatccaaacacaaatgtacttacttgaatttcctggttttggtccatcataaaagcaataagtttgacaggaagacagcctatcagtttgccctacaagtcttatcagtataactttggaaccaaccaatccaacactctttattttgttgggtagcaactactcctgcttgttcacccgacattacattttcttccagcaaagatccatcaaccttattcccttgtgtgacttccctgatttcactcgtggctgccattaaatgcactgtgtcttttgaaaacacttaaacactaattaaattaatttatggtatatgtcattagtatcccattttgccttggtcttttctgcccaaaacaataagcccccgagacattcaaaatgcttgtgtttagttgcttagtaaatccttagtatccatcataacatcaaatcttgatgacagtaatggtgatggataaaggagaaaattacaccccagagaagttatgagtcaagaatgtctagttagatttacttagaacaaagtaacagacaagataaagccctaagaataagtctgggttcattttaaattgagatgacaaccatcccatagtcctaaaataattactgcttctaatatagactgcacatgatttaattacttcacattgattttaaaacaaaacctacatgcaatagttgctgacagaagtttagacccgatgccttttcagccaggataggtacaagcactggcgcgtgtgacagcaggcttcaaacctcattcagcagacgggatagtaggctagataataaacagcaattagaactcactgtgataaaggccatggtaatattgttagagagtgctacagaaatgcacagtagtagttctctactcagaccaagagatcaggcagggcttcataaacatctccatgtaatttgccttacccgggctgttgcctaccctggctgcctagataatgcttgcttctcttccgagactcaactcaaatccaccttctccttaatccagatttattctttccttgatcagctaacatgcgcagtgttctgtcccctgcacactaccctcaaccccaggaggattcattgcttccttttagttgctataagggctttacaatctggccaggcttagtggtacaccctgctcctttcccattttgaataaaatctgcaccatagggccagagaaatcagagagaagagcaattaccttgagtaggtatattagttcattctcatgctgctaataaagacatacccgagactggctaatttataaaagaaagaggtttaattaactcacagttcccagtagctaggaaggcctcaggaaacttataatcatggcgaaaagggaagcaaacacatccttcttcacatggcagcaggagagagaagaatgagtgccctgtgaaagggggatgccccttataaagccatcagatctcatgagaactaactcactatcaggagaacaggatgggggaaactgctcccttgattcaattatctccatctggtccctcccacgacacatggggattatgggaactacaattcaagatgagatttggatggggagacagccaaaccatatcagtaggcatctaaaaactcagccctccactgtctgtgtttctctccccagcacttttgccattaccctatagatataatgatggagctctggcttcatgataacttcagggttacctggtatggaaaagagagacaataaaacttggtttttgtaacaatttttatgtcctcaagccagatcccctttccaggacatctccagcatgtagggatgattcagagacccagacataaggagtcacttaagcaaaccagagaagcatatacagttggaatttggggtggtgggtagagaggggcaatgttttttgaatgctacaaagttcaaatgccaatctgttctcttcctgccggactggtctttgtgatgttcaaataaagtgagcatgagatattctcaaagttagaaggagtctgtaactatttgcttacaggcagaggtttgggtaggggacagggtgtgagagcacctcagttaaattgtgtacggaggttctgaattgtttaggcaatagcaatgcattatgcaatactcagccaaaatgtgagtgtaataaattaatagaacttttggatgactttttcccttaaaatagacacttggcataatttttttttttttttttttttttgctgtcttgtctctccagcaagtgtttaatctttatgtgtttagattgtttattgggtgctataattatagatatttgaatattagagtgtccctactcaaactgttttcatcacaaaatgtatgacaattatattgtgccattagtagacctgcttttcttctcgactctgtcacaaggacagtgtcttttttttttttttttttttttttttgaggggaggtcttgctccatctctcaggctggagtacagtggtgcaatctcagctcactgcaacctccgcctcccacgttcaagtgattctcctgcctcagcttcccaagtagctgggattacaggcgcccaccaccatgcctggctagtttttgtatttttggtagagatggggtttcaccatgttggccaggctggtctcctgacctaaggtgatccacctgtctcggcctcccaaagtgctggaattacagtagtgagccaccgtgtctggctgagggacagtgtcttttgattcttggagttttgcacaacacctggcacataaatattcctcagctaatttatttaaaaaataataactagaggagctctgattcttgactggacacatgcaatttagacttctactaaataaaaaaagaacactagaatagagaatagatgcactgggattgtgcagccaggagaaatcaatctacctagattgcctatgtgattcaggtggaactaggatgccagcctgaagcgtagaaagaattcccaagtattctacagaagactacaggccagaggtagaacaaagcaagaagaatggcattttttctctacagtcagcttttaaaacagcatacggtcttgtttccatggcaagaaaatctcctaggtgcattgccaggagattctcccttagaaattaaaaagaagaaagaaaagaagggaaagaagccacccatagctgtgttttctgaaaacagcttgactctcctgctgatcatcgacggctgccacgccacggaaacacctcatccaatggtgcccaggccgcctctacgcagcatgctggaagcttgtgattaattttgtttgacagcagcaaaaagtatgccctacgttggatgccagctgattatttccagtatgtttgctgctgaaaattccattaatgatttttaatatccattcaacttgaagagaggagaaaagtgcttttctgaaaaaggaaaagtaaattggactcagtcttatggaaaatccaaatctacagagtgaacgtttgatggcagatgagttgaggaaaatgtgagcaatttcaaaatttttttacgtgaaggatttgctctattattggtaatatatctgtagagaatgtgttgtgaataataacatattttgattgatgtgctttcattttcttcccagtgtacaaatatggcaacttttaatgttcaacttgatgtgtatttattaattgcttactgtgttcaagacccttattaaatattgattgaactgaaatgagccctgggggaacctaccatctaagacagcaattctcaactgtggctccacatttgaattcccaggggaacttgaaaaattctgggccctcagaaattctgacttaattgttctggagtaaggtctgtggcctcagtattttttcatatgtctcctcatgtgcataatatgtaattagatttgagaatcaacagctgatataaaaggaagtgaaaaggcagtacatggccaagtccctgtagatatgcaaaggacactgttttaaaatcatttatctatttgaaaagtatgatgatttaaaaggagaggaaattacatttttttgaggctgccagaaaaaaactccatgaaggaagtaatatttaagtagactctcaatgtgtaaaattttgatcggcagagataggtatccaggtagaggatcaaagactaggatgagaaaagaataaggccagttctgtgaatacccagtgactaacacaaggctaggagaaaaggagtattgattgctattataaagcattaccattaatatgtaatttcagctagctatgaactcaaatacgtttatgaagtaatgagatattttagcatttttttctcatgtgctactcctaaaagttactcttaaaacaacagggttgacaaatatgtttaatatatggcaaaatagacatagatttaaaaatgcactttagtatcttgctatttgattgtgtggtcctcagatgagcagcattggcatcacctgtaacttgttagaaatgaagctaatgcaggatgttggcccccaccccaaacctaacaaatcaaagtctgcattttaataagatctttgtgtacacactaaagtctgagaagcactactttagcatctcaattattattacattattagcagtaattaattgagaagagtagagaagtacgtttcaacaaattaaatttctacctatgactgtgaacgatgaatagtgttgatatgcaataatcttttctttcaatcatatctttttatatatgtcaccctatatatccccatatagtaatgtacttatgtgtgattaatacatctaaatatgtttctttgtataggtgttctctccagttccagtctttatgtctaaaaagataacatcttttcattttagaccttggtaatgttttctgtgcttttcaaaaagatgtcctcaacatcacctctgaaaatgcattatgatctcctgtgcctctgccatctcattgcacactggtttcggtggcatgtggcagatggaacagaaagacatgaggctgggaaactcatagattccagaggaaacttgaggcacacaggaagctggttcagcttgggcatgcaagcattatttacctctttaatctgaattaaacaagtaacagtaagtaatgattcagagaagttttgttaagtggcagaatattttatggatgggtattttcttacagtgcttctgacctaagaaacggcagcctatcaacaaataattattaaaacattccttttcccaaatcgtattggatttggttacctgcttaaacacccttaggctgatggttagcaacaagatcttagtatactttagttacaaaatcatctgctgttctcaaactttagtgtgcgatagaatatcagtggatgttgctcaaaatagatactccagatcccactgagaatctgattcagtaatttgggggtaaggtccaggactcttttgaaacaagcattccaggagattttgttgttgttactaagaatactacattttgagaaaacaaaaacaaaaaacacattgctttaagacaggggtatccaatcttttggcttcactgggccgcattagaagaataaatgtcttgggctacacataaaatatagtaacacgaacgatagttgatgagcttaaaagtactgcaaaaaaatctcataatgttttaagacagtttacaaaattgtgttgggctgcattcaaatccatccttggccgcatgtggcctgcgggccaagggttggacaaacttgctaaggcattgtattcttaggaatttactattttctttcggtatcagtattatctaaactaaagctacgcaccaggctaatacctaagcttagtaaaccatagattgatccaccaacctttttgaaggagatgatattagaaaatgattttgtatccattgtaggatttcatattctaagcattgacatatgtaatctattgggccaggcacagtgtaatgccagcactttgtgaggctgaggtgagaggattacttgagcccgggagttcaagaccagcctgggaagcataacgaaaccctgtctctgtaaaaaatacaaaaattagccaagcctggtggtgcatacctgtggtcctagctactcaggcagctgaggcgggaggatcacttgagtctgggaggttgaggctgcagtaaaccgtgatagtaccactgtactccagccagggcaacagagtaagaccctgtctcaaaaaaagaaaaaaaaaaaactgaaaaaataagacagctgtattatacaatgcattagatttgattagtgaccatgttgcattttttgtaagaaaaaattcactaactgtacagtttttacaagaaacctataatagaatctgactttactggttggtgctggatgttttcttagctacttaccattaaagaaaggaaaaagaaggaaggaaggaaagaaggaaggaaggaaggaaggaagggaagaaggaacatgaataacaacttatgtaaatagatgatcattgcaactttatttatcaatagcaaaataaacctaactctcaaaccataggaacatggataaacatattttggcatacccataggagagaaaaatgcagtcatttaaattaatatttttcaaaatattgaatataagaagattctcatcatatcatgttaagagaagaaataagatttaaaaagttaattttaataatgataaaaacatacacatgaaaaattgagtggaaaaacaacacaatgtaaattggtcatatcttgaatattaaattgtaggtggttttaatttttttctttctaactttctgtatagtccaaaatattttcaataagtttatgtgacttttataattaggtaaaaaaaaattttaagaagtataatttttaaaatctgggttgttttaagagtggttcagcttaagaacaggtggatggactaaatgaacctttttaacattgcttcagttctaaagaccatctgcccagtcctattaaccagtaactacagaaagaagttagatccaattagtaaaggcagaaagaaacattgcctttgtgagttctgtttccctgtgcatatctgccaccttaaactaatggagctatttattgagttcaagctgtccccaacgaaagctgctttttactttgcttctgtgcaaatcttgttcactttttacaactggctacagaatcaaagccagcagctggcctccatgctactacacagaacaatagcctgagcccaagcttctgaagagcaggcctgccccagtatcttgaatgtatgcctgcataaaaagcagacaccacccaggatggctgtatctgctgcttctgctcaggcagtaaatatgtaaaataggaagccaaaacacatccagggccacatctcattgagtgcccttggggggaaactcaattggacatcagtttatctttaaaataggaatcataatggcttcctctgattatgtcctgtaaagtatataagtggtttataaactacagttttaacatactggttgttaggtgatcgtgttcccattttttatgtggttgctttctcaagcacatacataatcatgctaaagaacggtaaaatagcagcagtcctcctgccatgcccaggacttatgctactttgtaatgtgatctcaaaatggactgtaaatggatggcccagtggtatttattatcaccacttaaagtgaacccatatgccagtggcatattgagctaacaatctgtgatgtcattggcagaagcagctcttccagaaggcagagttgctgaggattctctatgacattactctatcagcatattggatgttgctcgtcaatagtagccgtggtgtcggggaaataaggtcaagtgaagcagtgagttactggtaacttaggggttaccacctgtcaaaaatcatacagattatgatttttttccaaaattaacctgaaatctcataggattatcaccatttatatgttttgattcttctcatcagtcctgtgaggtactgttattattgccattttaaagatgaggagactgaggttaggaaagattaaggaaggtgctcaagttcactcatttgggtggtgaacccaaatttgaaacctcccaggtaggctgaatgcagagcctctgctgctcaccactttataacgtttacctgtaaatattctgaacaaagtttaaaaaaggagcacttaatcacttaggaaaaccaactgccagagagtattttaggtttagccattcacataaaaataatgcaaactagtagagttactttcttcttaaactcatattttaatatacaaataagatttctaaatcccaaagagagaatcttggaagatagttgcaaatatgaaaagttgaaggctatttcattaaacccatttacgtttttttaaaaaaggaaacttgaaacccagagacgttgacttgctcccaaaattcttagaataaacacgtggaaactgcacaagaccttaagggtcctacctcctacctcatggttcagtgcccttcatgtgaccttgtccatatatttaagtagaattatgagattaaagtttgtaccttttcagtatagttgaccgactcttcttggaatctattgagttagtgttttattatgctctttgttagcctcgattgtttcccggatacaatcatggcttgattttgtcactgctcccttaaacttgagattctaacctacatgaactgggagcaattttcagtgttgttttgtgctttttgcttctggccatgtactgtgaggctgtgtttgaggttgtccccgtaggtactcattcagatagaattgcctgtgaattgttccttaaacttttaatttcagcatctttaaattgcacttacttgttttcatgtttggttttcttttctagattttaagttatctgtggtcagggaacatgacttatgtgctttagttttcttactgctcgtcacactatgtggcacattgcaataaatgttttttaagtaaataaacttggaaataattataattgatttcttcttttttaaacttcttcgttgatacctgcctttcttctcatttatctgaatcaatgtgtcattatggacagtgatcttgttggaggaaattaaacatttcaattgcacgtgggctctcttcttactatactttttcctcagcatgccacaattacccaaattcaataaagcaaaaataatgatacctaattaaagatgaaaacataaagtcgtttatctattaatttaaataaagtgaacctgttatcaccctgagaatttttttttttttttttttgagatggagtcttgctctgttgcccaggctggagtgtggtggtgcgatctcagctcactgcagcctctgcctcccgggtttaagggattcttctgcctcagttacccgaatagttgggactagaggcacctgacaccacacatggctaatttttgtatttttggtagagacggggtttcgccatgttgactgggctagtctcgaattcctgacctaatgtgttccgcctgcctcggcctgtcacagtgctgggattacagacgtcagtcgccatgccctgcccaccctgactttcttaatgccttgattctggaggatgcagttcttagtaaccaggctgtggccctctgatgtaactttagagaatgattaacatgtcacgtggttagctgggctctgagatgatctctgtaacaaagcagtctacattgttctcccaaggaagagatttgtgtgtgacttattgaaggggaattggttttgtttcttagaacggtttatcatttcacaacctgtattttccattgttattctttatcactagaaggttttaaaactcagaaataataaaagagaatataaaaactctggaagcctcttaaattgattgatgggaaaatagtttagtttgttaagtacattgtctggtagaccttctttccatactaggaaatggaatggaatatatacattccattcgagaatatatattaaatataatgtttgaatatatattcaaagaagtttgttgcattcattcctggcatggcctccttactagtttttctaactctgccatgtcacctgttgtttcgtggatgagcaacctattgagtttgttctctatacctttgtccctgtagaactgtgtttggaatcaggcttgttaggacagaaaatcaatcggagttgtgaaagaaagtgaaaccctggatgcattggagaggacatagcagaatggagaggaagaggatgggcataggaaagagacacaggaaagcccattagggacagtatagtaacctccatgttaatctactagtcacaagtgcattgagactacaaacaaaattgtaagaggatattttaatctataaaataaatgaaaaattattttcaagctcttcaaaggcattacttacaaaatatgtattattcttatcagactccagaaatcgatcattttgtatattttaaagaatttggtttcttgaaaaaatgtaatagagagttttcactaactcagtctatcttttcttttaattagttctgttaataagattttactgcataggtagtaccacttaccaccttacatttttaaactcagtattaattgtgcatagggaagcttcttgcacattgatggtctttaattttgaaaggagtacctctaaatcatcattaatttattctaagagcttgacttcattccagtctaactgtctttgatgcccagcaagaatggctgggcattttcttccaattaatacagctggcttctgtttaaatgaattaatcacgaattcaactgtcttgattctcgtagtatgacattaggaaccatttagtaataaagtaagaagcttaatacttaatggaaagaaagatctgtttttttaatgcaaaaattttattatcattccagttcctggggaaaattttgctgccatggcaagtattcttagcagactcttgccttgttctcctactttggaatcagggtgtttagatgatataccatagacagggacttgaaatgtaaagattgaatttacaaagctattttttttagctttacttaaatgcttatatacacagccattagtatggtgaccacatattttaagtactcaataaatatttgctggataaataatacatgaaaacacgtatttttttttttttttgagatggagttttgcgcttgtcaactaagctggagtgcaatggtgcagtcttagctcactgcaacttccgctgcctgggttcaagtgattctcctgcctcagcctccagagtagctgggattacaggtgcgcatcaccacacccagctaattttgtatttttagtagagatggggtttcaccatgtttgacaggctggtctcaaacttctgacctcaggtgatccgcccgtctcggcctcccagagtgctgggattacaggcatgagccactgcaccaggtcatgaaaacatgtattcttttaattagttctattaataagattttactgcatataggtaatactacttaccaaattacatttttagcttggaactgaatttgcatggtctatattttgcatctaaatatccagtaagtgtgtagaataactcaggcttcatttggtataaaaacgccttcctatttcaaacttgttttttttcccctttttgtggagagtggggtctcactatattgcccaggatagtctcaaactcctgggcacaaggtatcttcctgcctcttcttccctaaattttgggatcataggtgtgagccacctggcccagccaagcatgccttcttatttgtatagaatcatattttcaatttttttagtgactatacattttactaatttatttaataattagttttatatggctaatgatgaaatgcataattactaaaacttaatgaaacgtgcatttagttataatgcacaattttaccttccattttgtcaatcgtacttttgcaaaaccaattcagcttcaatatttgaaacatatgtgagagtatccctctattgtggataagagcttcgtactagaatattttaaaagtgaagagagaaaacgtggctcaaatagtctgaccaattacttagcatcttgtgaatattacaaagaaaaatgccttctaaaatgtgtttgtattttcttcttaacgttttatatatttagtgttcatttttatatttcctgaaaggaaatatgtaaattttgctataaaatcgagccatctttgtaaaagtgatcctgcttaaaattacaaaatctatctgagagtcatttataaaggtgtgaatgtatctggcagcctgggcaagcagtctgagttacttcctgatatatacatttggcccttatctggagaggactgtacatgtctgtataatttcttttgttgttttatttttttaaatttttaaattttattttattattattatactttaagttttagggtatatgtgcacaatgtgcaggttagttacatatgtatacatgtgccatgctggtgtgctgcattgttgttttattttgagagacagtgtctcacttcgttgcctatgctggagtgcagtgatgcaatcatagctcactgtcaccttgatcttctgggctcaagtgagtcttctgccttagcctccctgagtagctgggattacaggtgctcgccaccatgcctggctaatttttaaaatatttttgtagagatggagggtcttgctatgttggtctcaaacttttgggctcaaatactcctcccacttcaccctcccaaagcgctaggattacaggcttcagccactgcacctggctctgtaatctcttaattcctcttgagttagatagcagaattggcttgcatctggtctttatcttcctccagatgtaaaatccaggcccatcactgttgggtataaggagtgagagagaggggttactatttattccactcagtgtgtaatctattaagccctctgagccaatcaaaatcatgtgggcattgaagttcaaaaccacaacatagatgcattcatttatagtgacattgttgcttaggcaacaagaaatctgaatctcctattaaactagccaacagcaagaatttaaaatattttattttatatatctggtattttgaatcaattaatagagttttttttctgagaatgactaatagatacttagttttcatacaaagtttaggtgacataagagttacggctgatagctgccataacatagaagcataaaatttcatggtttagcacaaaacatgcttaaattttgttcacataaaatctagtggaatcgttgtggggtgagggggtgaggatcttgtatctctgatttgcgattgttcggggactcaagtttataaagatgtgtttacacggtcatcttgatagagactgcttctaaccattggcttctgaggtctcgttagcagttgacatccagctggtccactgaggaactgagaatgtgcaggatggtgcaggagattgtcacaggccaggcctgaaagtggcgtgcatctcttttgcttacattctgtaacctgttgtatggtcaaagcacatgcagaaggggtaggaaaatgaagtcttccatggagtagtcattttccaaaaacaacgcttctctgtgaaaaagcagcatgaatttttggtggtcagctagcttcctctgctgtgggaagagagtgactatgattgctgtattcaagcaccaactgaaaatcgtcagtgtaatggtattgaaaataaggctatttttaaaaatggaaacgaaacgcgattaaatccataattgaatacatttaggactttgctttagaactagaggagatgttatagcatcaagtagagtcccatttagatgattaaggagatattttggatttctgaaattaaaaatagtttttcctgtttttccctctggaaagtaaaaaatagtttttcccaagggtaaaaggggagaaactattttttactttttaagtaaaggtctaaaattccctctttctgtagttgctcaaataaaactgctaagcaagatgattttctctgaacatacgtgcaacacattaccttgtatttagtgattatgacatatgaacattctatgatgctaaattaaatttctgtaattaagaataacaatatccagatagtattttgcaaagtacttccaagtccttatgccattttagcctctcaatgagcctctgagagagacagaacaagtgttcttagcccctttttggacaaagaatatgagactatcagtgtttaaatgactagtttaaaattctttgggttgttaagggttataatccaaataatccaggattattgttaagattatagttctcattgtaatcctgtaatgttcttttcattatctgcaatgactggatctatctggacactagaaacggccattcgtgtacgtttttcaggttgtacaatttataaaaatgcccacaaatgcagttgatgtgagaatcaccaaggtgactgaagtaacggatcagcattactggtttattcattttgctgatacagacatattttgtgtattgccttttaagtatttatagagtagaattccaagagctgacagatattaagatattaagactttttcttttctttttcttttttttttgagatggagtctcactctgtcgcccaggctggagtgcagtggcccaatcttggctcactgcaacctccacctcccaggttcaagcaattctcctgcctcattctcctgggactacaggcgtgtgccaccatgcccagctagttttttttgtatttttagtagagatggggtttcactgtgttagctaggatggtcttgatctcgtgacctcatgatccacctgcctcggcctcccaaagtgctgggattacagacgtgagccaccgcgcccggccttggaatttgtattttaaaatccatggacaggtcaaaacatgttaagcaagaagaagatatatctaagagataactttgtaaaagtcttcaattatttgaagggcctgttagagagtggctggctgtgaggaacctggctgggaacacatgccagcaaagacctaaggacggcctgagaaatttggaggaagggggaactttccttcagagttattaagcactaaaaccagtcactagtgtttttagagaacctttacataattttcttgtaaaaggaatagattcttctggaacagttcattaaaagctctgcatgtatctaggagggaaaaggaaaagatgaaaaaaatagaggacttagcaagatcattttttaacttcaagtccccataggctgtaagttaatttactgacaaactatagaaactgtaaaagatttttccttttatatgacacaaaagctggtccaatgttatatattaactggtcattgatcagaagagtataacagaaatcatatctttaatataaatattaaaattgcctcagaacacatttaggaaccactgcatcctgttaatatagacactgactacactttgcctgccttttaaatgtaactgtctcagacattgataaaaggcactcacatctgcaagattccccttgttttttgtacaatgaaactctttttatcataaaatcaacacaattaaaaattcgaaaagaggtttgactcccatattactttaacaacatcccatttatgttctagtctttatttatattcatagattttttttatacagttgcaacacaacaaaaacatacatcattcttttattgaccacaggttgacttagtgccaactctctggcaggccctgttctagggctggagacactgctgtgaattaaacaaagtccatgcccttgtggcaactatattctagtggaagtgggtggggctagacaattaacacataagccaacaggtagataatgtcaagtggcaaaaagcaagcaagcaagcaaacaaacaaacaaaaaaaccacgaagaaaactgaagcacagaaagggacagagagtgatggggggctcttcaaacttggggagttagggaaggctcctttgagcagaggatttgactggagtgaacagaggaagttacttctgtgactgtcagggtaagtccattcctgacagaaaaacagcaagtatataatgcctgggaagggaactcgcttggcatgctggaggaggagtaagggacaccagtaagtctggagcgtagggagcaagaaagagtggtcagaaatgagatcagaggtcagcagagaccacctgataagtaccactgtgtatggcaggtattatgttgggtgataggaatacagacctgaccaagacagttcttaacttcaaaaaggttacattcaaataggcacatagatgtataagcaaataaggaacaacaaattgtgttaggtgccattataaagaaaggagtatagtgctgtgagcagtgtaactaactgcatcagtgagatgatgatgccgaaatgggatttgaaggatgagtacaaggtttccaggaaaagaagagaggaaagagtatttcaaacagagagagcagcacatggtaaagtcaaggagttgacagaaacatcctggcatgtttttggtttagcaaaatgtttagtgctgttaaaaaaagatgtatgttggaaagttatgggagatgagggtggaaaataggttagaaccaaattgtaaaggttccaagtttaaaaattttccaaactttacaataaagtattctagactattttctgtttttcatttgtgttatgttattctatagaaatttaaagttcttatccattatactaaactcattgttttcctgtgttattttttgctgctcctttaagcagcaaaaattattaacaagcaattaaaatattaaacaaagatggcttaatcattttttaagcagaggtaaccagaaagaattttcaatgacactttaatttttggtctttgaggaaggaatcaagaccttgaagttatatctatattatttaataattatttactttaaaaaatgataggtttcctagtttccttacagatactgacttaccacaagttctacagttatacatatagtaactttttaagggactatttcttgctcatgtaatattacttttcaggagatgtaatgtattttgaatggctgttattattgtttaaaatttattcacttcattgtcttgcaactaggctgaaaagttttagaaatgaattataaataaattctagattctgagcataagttttcccaatgtattattttaacctctgaacctcaaaagatttcatttcagactgattttattggttctctttttgaaaatggaagtgtttctaaaatttctagaaaagcctggttttttttaataagaaatcataatcaatccataagtgttattcactggatagatttaaggctgataaattgctgtgtcccttgatgctcttcattagcatcagaagtaccatggtgaaataatgttatgggaacctcaggctctggggttttacagaggagcaggcagtgccctgagagacagcactgggtcactgggagttttcacaggtgccttcctggctatgctgaggtccttttgttagtgactggcaatagtcacagttcatttgggaatgggcaaggggacaagctggggaggtttcagcattttagaatatacatgtctatgcaaacaaaacatgagcatcatctttgattttgaaacataactttaaagtggaagcgtttacctatataaagtggacatttccagagcactccattaccaacaattggcctcacatatctaaaaacttgactgtagtcttattttaatggggcttatgtaacaaagcttgaaaacctgagaatattaatttttttgttttttttttcttttacaaaatgttatttagaaaaggacgttttatgtctccaaaagacggtgaaacagaaatcaaatgactggaaaggaactggaaaggaaattaacatttatctgtagatgggcctttatatatgaatccaccgaactgtcacaattgttgcacagacataattagaaccacatttttacagatgagtaaactgaggctcagagaagttgaatgacaggtctgtgaattggatccagatctttctggctccagtgtcccttttcacactgctcctccctatcatgagtcccagctctatttaaacatgtcatttgatatttttgagccgtagttctgctctagttaattatcacaacataacaaaccaccccaacacttagtgatttaaaaccgacaatttaaattctctcatactccagtgggcccaactggctttcttacctggtggtctcagggaagtattccaaaaaagtgaaatggaagctgcgagatctcttaggacttctagcctctagaagtcatagtgccacttcaccacattctattagtctcagaaagtcacaaggccagcccagattaaatggtgggaaatagattctacctcttgatgggaggaactgtaaacatttcatgaccatatgccatcagtcactattcttttctgtctttaatttttaacacattgtgttatgttgtattattaccaaagcactgaagaatgttagcaagtgaaactttagattatttgtctctaaaatgtgcctcctaattttgttctgctttaccattgtgaagaagatatttgaaaggaggtaatgagcatggagatgctttgaaaacctataaatagagccctttataatctaagatgttactatgatttatggaagatgctagtatttattgtagaaatgatatttcatcaattaaaaaagcagatgaaggccaggcatggtggctcatgcctgtaatcccagcatttgggaggctgaggcgggtggatcacctgaagtcagaagttcgagactagcctgaccaacatggagaaacctcgtgtctaagaaaaatacaaaattggctggatgtgttggtgcatgccaccatcccagctactcgggaggctgaggcaggagaatcgcttgaacccgggaggcggaaattgcagtgagccgagatcgcaccactgcactccagcctaggtaacaagagcgaatctctgtctcagaaaaaattaaaataaaaataaaaaagctgataaaaaaatatatgaaacaacctcctgttcatagggcatataattctttcttctagacttacagaagcactaatggttttctgaaacgtaataatatgtggtattttttattaagtgttttgttgttgtttgtgtgtgtaaaatcaaacagtgagtaaaagttgaatggaatcggttttccattctttgggcagttaatagtattacagccagatgtcctcatacaaggaagtctgtgaaatcatatcttgggaatagaatggttttcactaatgcagaaattcctaactcaaaagactttcccaaagagtgagattcctcagttaaatctctttctaagaatctttctaactttgaatatagatttcataaaaatctcaaatcattgataagctatagttttatgaaataaattattactctcaactccttacttttctaaaatctattttttttgcatctcaaaatattattacagtttgctaaaatgagttttaaaatggaaaacctacatagtggtatgaaacagatatcctcttgattacttctttttttaagggatgaataggtgagacgttagaactttacttaggaagaggttcttgaaaattaaccctgaactatctgttcttaaatggcccaaataactgacattataaagattaaaagctttgagtttggtccttttttggagttgcttttatatatacatatctacttaagttgcgttctctaccatgaaatctggggattagaaaatacttagaccaagccacaggcatattcgtttagctcacattatgttttaaaaattgagttagttgccaatgttttaatcagaagattttatgtaaaagtcttaaattctagcttcgtgataaaagtcagaatacctgataatattgggccagcattcccactctaatataatgttttgaagctgaatagaagttaccctcgttagacgaggcacatgcaacctggttaccattattttcactttccatacttttataatctgcctggttgtcctaggcatttgagtttgagacaatgacagagttgtggctgaaggattcaaacatgcctctgacgtttgataaacaaacacaatttgagggctacttctgggcatatcagtggtacatcagtgacaaaggattgagaccctcagatggatgggtgcaaagagaaatgaggaacttaagaattccatatgccacctgatcaagctctgaatagcagtggtacaggttctgcccatctttgaaccatatcataaaacctgattttggcagtaatacttcagcacagattgtacctgctgtttttaaaatactgcttatcagtcatttttagcatcatattgatatcaaggccaacacagcctaaaattttgacttccctcaatgctgctgaaagctacaaagaaaggaggacaataattataatcccaaattacccttaattctgaactcaggaatttaggcaaactaactaaatagtagacctttcttttgatcaaattttggattggcacagtctttaagagatgtgatatttgatctgtatttttgttaaaaatcttgtgaattctgcagtgaattttttccagagtagttatcattgtcctaccaattagaaattttaatgttgattaaaaagcaaaacggtccaaatgtctgcagttttactttctaaaacagagaaatgaaatggatcagcactacagaaaattatcaaaattagcttttaatagcagtagctaacgttatgcagtgcttattatgtgccatccctttgagatagatatccccacttttagatgagaaaattgaggcatggataggggattaaatttgtctaaatttgcagagcatgaggatttgtttctaggaatttgtttaaagattatacaatgctttgcgatggttatagtcttgttttatagattaagtgcttttaatcgcttggctccaccctctttcagtttgcgctctctcagacatacgtgacagccaccactgaatttcacaaaggtctttttttcagacattgtaagaatgtgcaggagtccaatgttttttgggctttggggacattctgtatgaaacttaaggatttatagtcatatgtattgtaataacagacaaaaccaaaattcattaatatgaagattggtagaaactgtggattttccttataaaacaaaatcatatatttccattttaaatgtcatttttttctcttctgagattgtttgaatatagccaatgtgtgttcttaaatttagtttttaaatgtggtaatgtacaaagatgaaaattacggtgagactatttggatttttttaagaatggcatctggccacagaattgcaatccatacactacacaacataaaaaacatacattacagcactaaatatagttcaggcttgcctttgcttctgacttcaaggactgaaccatataaacacaaggcagatgaactagtgagaagtcacttggtgtagaagtccttgttaattaaagtgtccatggaccagcagcatgggcatcacccaggagcttgtaaaaagcagactctcagaccccagctttgacctatggaagcggaatttatatttacatcaacagattattcctatgcacactaatgtctgagaagcattgggttagatagattggattctgccagtctctgggaattagctattcatctttgaataagttactatgttctatgtattttagtttcctccatttcttgctacttactacatgttgatttagagcaacttaattctgtaatcttcatttagttgcctataaaatagggatattaataatacctacctcctattattataaggattaaatgaggtaatgagtgtaaaatatatagaatattgtccacatatagtatgtgattaatatgtgcttgtgatggttcttttagttatttctctggtgcgctatataatcttattgattacatgacaagtggaattagaaatttctttcaaaatctactacacagatatataaatatgcttttaaaaatcaaaaaattagaaggagataaattttccaagggttaaagagtctagtggaaaaaacactggaatgggaattacacagactaaactctagtcccaattcttttgaccttgagcctgacatttaacttttttgatttcatggatattatataagaatataaaatgccttaacatgcttatagtgcagttatatagatttatagaactggcagtaaccaattattatgcatacattgtcttaatctatgagaatttgtgatagggtgttcaggtgactgctgttctgtgacattatattgggtacttgtagaagtttcagtaaatccttcagattattaaattactgtttaagctgcaaacacatgtcctgatttcctatatctaatcccaaatccattatttatataagaagtagttcctttttgtgtatttatatttattttatttatttatttattcgagatggagtcttgctctgtcacccaggctggagtgcagtggtgtaatctcgcctcactgcaacccctgcctcccaggtgatcctcctgcctcagcctccaggcatccaccattacgactggctaatttttggtatttttagtagagacagagtttcaccatgttggccaggctgatctcgaactcctgacctcaagtgatctgcctaccttggccttccaaagtgttgggattacaggtgtgagccaccacgcccagctaatttgctttttgaaactctgtttattacgcaataatgccaacacatttattaaagcttcaaataaaagtcagctttcctctcctctttatgtcatatgttcatctaggtgatatatgcctgaatcattgcaggcacacaacaaaccttcaccaaataagacagtaactttacccttgttttctgctctccattaaataattcactggaatttgttgcttcccttttatgttagtagagtctgtaccaaaatatcaactctatgataaccaagaactttgagttaggagctcattgtaactcttctttgcttgaaaatctgtcccaaattcataattaacttggccagtgtttatattggagtagagtatactgtgaaacttgtataaatgaatagaacttcttggaccttccttaatctgtggcttttgtttctctttttcaattattaatgataaatcttcccagtgaacatgcagccaacacattgaataaatatttcaattaagtcggatgttgatgtgaatgcaaattaaattaggcaatttttctgcttattttaatatatctgcaaatcatatcccattgaagtgctttgtgatgttttttaaaaaagagataaagtgatctcttaaaaactgaggagtgctgttatgcttaagcatcagattcataaataaataaagacatttcttatcaacctatctctgagacaaagacttcagccgttagaaaaaagacgttctcaaaggaaccatgttcttaaatacaaattttgatacttatctgaaggggatatttgattatggattcaaaacaatacatccagcactaagaggaccagaaggaatttatgtgatggaaaagagggtgcagcacgtgtgtgtgtgtgtgtgtgtgcatgcatgtgtgtgcgcgtgtgtgtataaacattgaagctgcagtgtattacagttatcttcttgttagcagcttttaaaagatgtaattgacatagatatttagtgtacatatttagtgtggggtacaatttgataaattctgacttatgtataaaccataaagccatcactgcaatcaagataaaaaacacatttagttactaaacatatttagttattggaatgtcagaaccagatttcatcaccagtaaaaattttactttatgttgcatttcaaaaattaagttagatttgtgtatattcatttgtgtttagtcacaaagcattgtttttgtaactaattaatggtttttgtcttgttttttaaaaaatttagggtgtggctggaatgcatgctgtagcatgactggcctccagtggtgtctttgaagaatagcatcactgggaaagtcaaagcaacaggtgaaatttaaaagataagagcaatttgcacatcagctaagatgctgtggcacagtctaattggcaggggctggtgaaatagaacattagatcttcaaaaatggaaggtgagaactaccctcttccaatgttgggattcctcagtggcaagaagtgctctgatgctgagtgatgcttgactgcagttattactcaggaatttttcacagaggaaacatcaaggtttatattgattttctttttctagaagagacttttttaggctgcatttttttctactgtgttgatgcttcagaatatatctttattatttaccttttttccttttgtgcctttttcttcttacagcttttaatttggttatatactccaagaactctaaaactgtacctatatgagtaaaaattgttacacataaaatgcgtttttgatttggagtcattttaatgatgaatttaggtgcctgagagtgtgcctgtgatttgtatcaggcacgaagacaagaaatgtttagatcttgaactgctatgttctggcatgtcctatctctttattctttctttctattattctattgttatccccagtagaggaaatgtagaatcacaaattagattatgaggattgggggagaatctaggttacaataagtgaaacagatttatacctttctgtttataagtataataataattcttttataaaaatagaattctttatcatatgaaaaggagaactagtttcttgtataaatacatttgtactctacatctcactgtctgtgcatgctcatattatgtcttcctacagtttttgtccatgcatgtttatagtagttaactgcaggctctcatctgtgctaatgagtctggtgagccacttcgttggctgccatgtggaatctgagcacatctttcctttattccatgtccctctggtctatcaccaggctccactgggatacaaaggtgcatattgtctgattagaacccttcttccccatggtgctctgatgaggggctgccaaagtagtgtagctgtgctccagcgtcttacaaagttcatcccgattcttcctatagggttcaaatataaggagcactcagaagctgaccaggagttcagtgcctgtgacagcaaccagcctttcctattttatgaaggacaccttgtcactgcatgggtctccttatgaattgctccatcttccgtttgaatgagctgtttacaaaagtctcccagtctcctcatcaatcaggattaattgatttgttaaataactgattaatcactggaaccaatgaaaccccaaaatcacagtgacttaaataagatagtagttcatttctctcccacataaaataaatccagacgttggtaacctggggctggtaaggcgctccatgggctcaggaatccagggtccttctatcttgcttctctgccatccttaccatgaggcttccacctcacagcctgagctgatggttcaagctgtaaccatcatgtccagcagaatcacaaaaagtggatagcagtatttatgctttatctttaaggccacttccaaagctgcaaataactctttttaaaaaaattctattggtcatcacatagttacatgaccatactttgctttagatgagactaggaaatgtatgctgcaggagcacatatgcagccatgtgcccaactattactattattattattgttgttatcattattattttatcaaagcaagaagggagaccatctattgaagaataagccttcaatgctgtatgtagaaacatagaaaaaaacccagtaagtcgattttgccacaatacttatgcaagtaggtctctggaagactcattctaccagtccacacaatttgtctaagtctgggcttaaattcaagctaagacctactccattatactttgcttcattgtaaagtaccatatgccttgggcaaaagcaatattaattgcttccaaagccatcaagggctattttatttggacctttctgtggcaaatattatcactccttcaattccagatttgggctaggatgtctgtcatttacagagttgtccagtgtcacttttccttttttatatcattagattttcttaaagtgagtcactcatactctctctctctcatatgctggaatagtctatatgatgtgacctttgcaccagttgtgccagatggtgtgctttcatgacaagtattcactcccctaaattattcccacaaaaaggtatagctgatttctttttttctgatagatctctgtgctagagttaagttaatagaactcattcagattggttatggttgtcttcaggtcactcagcaacataattccttttctctgagtgagtcctagcttatactctgtaaggtagatttggctgcgttgagctattgtctaagagtggtagactccagtatgcaaattgcacccaatttatacagcttgggagtgtgttttcttatcaaagattactctatttcctaaaccaaagggaaaataaattaggatggactagtgttagagaaaaagctactgcttttggtacatgttcatttcaggaagcactgtataaatgaaaactttccaatttttgcccaagggctgactctgtttgaaggactattaattttagacataatcaagagaaattataggcccagatgtagggaaatcagaatgctgcaaatatttgagcactattaattattttagcttttacaaagctaactttgaaatttgagttagccattagctcaaagtaaaaacccaaaatagctatagataaattttcctcttgtatatatatgtgtgtgtgtgtgtgtgtgtgtgtgtatatatatgcacacacacacacacgcacacacacatatatatgtatatatacacacacacacaaatcataaatgtgcttgtgtatatataagataaataaaatgataaagtctaaaatatcttagtggtttataaatgctattcatgtaatattggacaagccatgtttcagagtttccactttctttttatatttgcctactgagtgaaatttatagcattgaatgaattgtttggaaaagaaaaaagattaaaatccatcaatctaagcttttatcatagaaaactagagaagataaagaactatataaacctaaagcaaacagaagaaaagaaataagaattacagcagatacaaatgaaatttaaaacaatagagtaaaatcaatgaaaccaaaagctgattatttgaaaagatatataaagttgataaaattttagtcaaactaacaaagaaaagaagaaagaaaacacaaattcctaatatcagaaatcaaagagggatggatcatcaccgttgattccatggatattaaaagagcaataaataaatattatgcacaacaactaagatgaagtggactaattccttgaaaagtacaatctaccaaaacctatacaaaaagaaataggtgatctgtaagtctgtatctatgacagaaatcaaatcaatggttaataaccttctaataaataaagcaccaggctcaaatggtttcactgatgaattctaccaaatatttaaggaagatatgataacaattctctacaatgtcttccaaaaaatggagacagaatacttcctagttaatcctatgaggctggtataaccctaattctaaaacccaataaagacaggacaagaaaggaaaactacagaccaatatctgtcatgaaaataatgtaaaaatattgaacagaaagatttatataccattatcaagtgagatttattctgtgtatacaaggctggttcaccattcaaaagtcaattaaggtaattcatcacatcaacagcctaaagaagaaaaatcgtatgatcatataagtgaaggtagaaaaagcattagacaaaatccaacacccattcctcaaaaaataaaaagaatcacagaaaactaggaactgaggggaacttccttaacctgataaataacatctacaaaaggcctatagcaaatattagacttaatggtgagaaactagctgctttccccctaagactggcaacaagtaaaaatgttttctcttactctcatattctacatcatactggaagcttagctaatacaataacacaagaaaaggaaataacagatatattgggaaaaaagaaataaaactctctttgttcacagatggcataattgtctatgtagaaaatcccaaatggtcaacaacaataacaaagacctcttggaactaatattgatgatagcaggatcacaggatacaaggttaatatacaaaagtcagctgatttcctatataccatcaatgagcaattggaattggaatttttcattagcaccaaaaaatgaaatacttatgtgtaattctaataagacatgtataagatatatatgagaagaaccacaaaactataatgaaagaaaccaaaggagatctaaataaatattccatgttcatagataagaagactcaatattattaagatttcacttcttctcaacttgatctatagactcaatacaatcccaatcaaaatctcagcaagttgtcttgtggatactgacaaactgattctaaagtttatatggaaaggcaaaagactcagaataataaacacaatatggaagaaaaataacagaggactgacactacccaacttaagacaatataaagctatagtaatcaagacagtgtggtactggtgaaagaattaacacatagatcaatggaaaagaatagaaagcccagaatagatacacacaaatacagtgaactgatttttgaccaagataaaaggcaattcaatgcagaaatgagagtgttttcaacaaatggtgctggaataactgcatacccacatgcgacaaaaagtgaatctagtggcagatattatacttttcgcaaaaagtgatgcaaaatggatcaagagttaaatgtaaaatgtaaaacgatgaaacttctagaagataacatagcagaaaatctaggtgaccttgggtttgatgatgagtttttagatacagtaccaaaaggatgattcaggaaaacaaaaattgataagttgggcttctttaaaatttaaaacttctgttttatgaaagacacagttaaaagaatagaaagacaagccacaggctacaagaaaaaaaatctttgcaaaacacatatctgataaattgtagccattatatacaaagaaatcttcaaactcaacaacaagaaaacaagcaatccagtttacacatgtgtaagtgatctgaacagataccttatcaaagaagatatacagatggcaaaagatgcatatgaagagatgctggacattacatctcattaggaaatcacaaattaaaacaagatgttgttttacagtacaaacctattagaattactaaatccaaaacactggcaatactgaatgctggcaaagaggtggaacaacagaaactgtcattcattgatgttaagaatgcaaaatggcacagccacttgggaaatcaacttggtagtgtcttagcaaggctaaacacagtcttactgtacaatctagtgatcatacttctaggtgtttactcaaatgaaatgaaaacttaggtgcacacagaaatctgcgcttgaatgtttacagcagctttattcataattgtgaaaaaccagaggcaaccaagatatccctcaatagatgaatggataaactgtgatattacagtttacaatggaatattattcagtgacaaatgaactatcaagccacaaaaaaatatgcagcagctgtaagggcatatggctaagtgaagaaacaagcccttttgaaaaggctacataccatttgattcaaactatataacattttagaaaaggcaaaactttagagatagtaaaaacatcagtgtttttcagaacttttgtggggagaaggggaagtgatgaatagatgaagcacagggaatttttagggtcgtgaaactattctgtatgatcttgtaatgctgtgtgatcctggaatacatgacacaatgtacttgtccaaactcatagaactgtacaacataaaaagtaaactctgatgcaaattatagaccttaattaattaaaaaatagaataaaatcaacaacaaaaacatttttccgaattatagagattactgttgataacatgttcatgtatctctttccaaatgtatatatgtaaatgtatcataattagttttttacatacatgaatgaatttgatatttctccctacactgccaaaaatcaggctttgactaaatacagagtaactttttgcagagatagtatttcttctagctgtaagaaggaaatatccttaatttctctaggaaattcaatatggatcccaagggatgtgtcaaattctaggcattagtggtgttaactggactctaaagatacataactttagcatttttaattatcaatattccttccaatgttcttaggcaacaacaaatttttcattctttcatacattcatgcattcattcatctatctaagaaaaagttacagagctcatataacacgtcagttaatgttttttggcaccaggaacttgtcttagtggagtctgtatttctatggagagaaaaaaaaattcaacaaataagaacccaattacctatattactagaagttgtggtaggtgctatgaaagaggacacaggtttgtataagagagttttacaaggagacctggtttggcttgagttgggaatgcattaagggaggcttctatgaccaagttatactgaagttgagatttgaaggatgagtcagatgcaagaatgaggacaacattccaggcagagggaagtacacatgcaagccctgaagtgggaaagaccttgatgcacatagggactgaaagaaggccagtgtcaccggtgtatggtgaggatagagaagcaaagagggtccagctcatgaaggctttggagttgttactaagtttaatggaaatttattggaattatttgggcattggctaggtggaaacaattctataatttgacactgttacactgagaggaatggtggagggatggagtagaagtagggtagctgataggatgttatggttatagacctggtgagcagcagcggtggctggtggctgtggggatgaaaaaaaagtgtacatggaagatatattttggtggaaaaatttataagactcagggatagattgaatgtggacaactcccaggtgtttggctgggtactattcacttagatggggaagcctggagaaaaaaacatttcgggggaaaaaatccaaaaatagtatgtgagacatcaaagtggatatgtcagatgggcagctcagaaaagaggctagaaccagagataggaactttggattgagcacatatatgagatttaccaccatgggagcagatgctgctggtggggcgcatgtataggctaagaagagaggaagccccaggacagttctgaatttgagttccgatagaaaaggaggacacctcaaagaaaactgaagcaaagcagaaagaccatgaaaagaacaggagaaagttgagtgccagaactaagaaaagaaaattccaaaagaaggaagaatgtccaactgtgaagtgctgttaaaaaatcagataatctgaggactgtcaaatctctatgagatttggcaacgtggaggtcactagtaatttagtaagatatttcctagtatcttaatcacatacctagacggaactgaatttctagatatcctcctctttattgttctcaccttttgttccaggactaacttcattttcagttcctcttcactttcccaagttattttcctatccatctattctcctcactttgggccaatagaaaagtgtaacacagggaggaggggaggtgaggaaaagaaaacaggacaaaagttaatgcaacatggtatttaattttgtgcattcttcacagaattgcttttcctccttgtatttgcctaagtatttcatttacttagaaaaacaagtatattttaattttaaaatattatctgtttcatcatgctcaacataaatgtaatcctgtgttgtctactcctgaagtgattaaactataaatagagctttctttgcaacttaatttgctataatccttagcataaaatgaagatgtccttaatgtggaatgcaaatactatgatatggctgatgtcatgaggacttgaaacgtttcatcctctttcactaattttttttaaacattcatataagaaaagccttggcattaaatgctaagaaataggtgcttagatggccagaaattgactgggtttgatggccttcatgatacaaaaacatcaactgttttaaaaatagtattatctaagactgaagatttcttttaagtgagaaatgtattttgaaattaaggaaaagaatgtcagtgatgttttaatggcaatttttgaaagtagtcaaaagacactccagtatatatcgtcatgaatttatgactaatgactaaaataatttagaattctgcttagcactaatcaaaatccagttaaaagactgcttttgtacttttgaagcacgtaagatctttggaaatgcattactgaatattatttgtgcttttaatgcttcatcaacatttaggagtacaagcttccattgtcagtgttttaaaagtcagctatgtaaagctgatagagtatacatattaaatatatccattagtcattctcaggaagtggaatatgtacacacatctgaatatttgcttaaatataaaacaagagtaagatgtttaagcttcaatgtagaataaaatactgatatttgggttttaggttaaaaaatattagttgtgatttttgtcccccttttcctccatgcctttgattccttccctctgaagacagacaaaatcctgacttaggcagtattttttaaaataccaagggtctcggaaacctagggtttgataagtaagaggaacagatcaaattctaaatctcctttgtccacattgtcattctccagcttgttgttcttttcagtggtgaggtaagaatataactcctacttaatgttcctgttccttaggtgaaacactaccaccttttgttcaaaagttagatgctggggttgttgctgttgttgttttcttcttttcttcctttactttttagattttgatggagacgtggtaggaagtctgggctgggaaatgaggtgaaaaagaaaagcaattagtttgtctttatacaaaataaaaccttctaaaaaaccttattatcacaaaaaagagctctacaaatctagatagttgttttgaagaagagaagagaattgtgaaaaacatgtataatttgggagggctgggcacagtggcttatgcctgtaatcccagcactttgggatgctgaggcaggcagatcacctgagatcaggagtttgagaccagcctggccaacataatgaaaccctgtctctactaaaaatacaaaacattagctgggtgtggtaacacacgtctgtggtctcagctactttggaggctgaggcacgagaatcgcttgaacccaggaggcagaggttgcagttagctgagattgtgccactgcactccagctttggtgatagaacgagattccatctcaaagctaaacaacaacaacaacaacaataacaacaacaaaaacatgtataactgggaaaaaactgaaagagaatgcaggatcataaaaatatagcaaacaaagtgagtgggatttaaaattagtggaataagaaataatgggtaacaatgaagaacataatttaggtaatagtatagtatcttgggagccctcctggaagtatctagttatggacagtgagcagcagaaacaggatgtaactcaattcagcatacttgatggttgtggtaaccctagaaaatgactccaggaaataggtgagaatccaatcagattgagaggctaatgttcatgacaggggtgccctagcagacaggcaaagctgaatagaaattcaggaggagaggaattttggctatttagtaaaattatgagcagttggtcataggcaaattttatgagtaggtagcccttctgaagtcttaggcatataattaacctaggttggaattataattagacatcaaagtttaaacttttttatctgaaccgagatgcaaaagtaaattggttctgtgttctggagaattgtaaaagaattccttaattccttagcaaaatttggaagtcagtatcaagtggtgaggataggaaagttgaagagactgtggaccaggcaagaccttatcagttgatttaggaagcagcagtgacagaggccagacaggtaacaagagaaaagagaaggtggaaagtaagagacagttttaattgctacgatagaaagatgggattttgaaaagattagctatatggaataaaattaaccaaaaattgatccaagattataagaaactatttcaagactcattaattttactattgctgtcaaacacacattaaatcattttccacttgggtcagctataggcatgaaggttcatttgtgaaacaatttctgtagagtattattccatgatctgacatgcttcacaaactgtgtttgtacatccaacttaaaagctgaatagtctatggtaattctgccatcatgtttgaaattttcttaccttaaacaaaaaacctgatcatattgtattactcaaatgtgtgtaagactagatttaacttaatgtgtactagtgtacagtgtgagactgcataaacaaactttaaagaaattcgttatacatattttgatttaacctacaatgaagttaagagaaatccttaaccccattagagatttgggagagggatgtggcaactgctaacttataaatattttgctaatgcttaaattttactagctttctgtcaattcctatttttactcaaaaaattatatagtatttaaatttataatttgtattcagttattctagcttactattatatggtatggcttgacggaaaggacattgtcttcttctcttctgcaaagcagaaaaatatccactaaacacaaaaatatacacagcaaatgttaaagtagccctctaaaccttatgaagacttttaaatcctcaaatagtacttcagagcaactggatttaatatctttcatccagcagagggctaccaaactccattagtttctgtgaacacacatgacaaaaaaattcagatgggttatttcagtggttttcagattgttttaagcagcagatccttttcttaagatagagttttacagtgtggaagtgagatacactctctgctttaattggagaagggcctccaagctgcctctccagaaggcccagagaggtgtggaggataattgaaaccctccactctgatttatccaaaaatacactcccacatttaaagtcagctctttttgggatcagtcgtaatccttaatgctgacaccgcatggaaaatatataagcagaatgatgcccaagttatagaagttcctcttcctggattttgtcttcaattgtaactgtagttcctaccgtgtggttgtatgtgttgttagtttgtttttgttttgttttgtttgggaaaggtgacatttcatctccaatctaatgagtgagaaagatgcttattctgacaaattttcttcacaatatttcataggtgtgccaagctgacagattggttgactctgtactcttttattttattcctgtaactgggccagtttctgcccttaactaaaactggatcaattataggagtgaaataaaggtccatctcctgcctatttattactttgctttggtaataaatctatttttaaaagaacctattacagagacttccatttggaattatgcatacttggtgtcaaatggtgattgttctttgttgtgtttttccattcgaaacaaagcttttgtgaggcgtccctttattctgattaaggcctggtgtaaatctttgataatgaagcccattaacaaaaatgactataaatagctctacttctatcagggatattaaatactttctcaagcacacatgctcactgattttaagactcattccacagtgttccaagttgcgtgttagattttttttttcttgagacgaagttttgctctgttgcccaggttggagtgcagtagcgtgataacggctcactgcaacctcagtctcccaggtttaaacgattctcctgcctcagcctcccaaatagctgggattacaggcacatgccaccatgcctggctaatttttgtatttttagtagagatggggttttgccatgttggccatgcaggtcttgaactcctgacctcaggtgatctacccactttggcctcccaaagtgctgggattataggcatgagccaccgcgcccagccagtgttggattttatcattaccaaatagtcataaagagtgtgagcttattaatgatgctgaccattcaaagtgatcagcaatctctttgcacacacactatctctggggatgagtctatctatttccagtccatccatcttgttttggtcttgtaaatctactttattatcttatgcttttatattcatgttttgtttcagaacaataatcatagtagtatcatttattgatctgttaccagtgttttacatgtgctatttcacttggttctgttaggtagatattgtcttcattcatgtgaaatgagattgaagcccataaaggtgaagtaatgcacccaacatagaacccaaattaggattcaaaaacccaaatttgatgccctctaccacataaagaagctttatttcatagcagtagcaaaaccattatttgatcagttaataaaaaagatggttaaagtggagaaaaaactgatatatgcgtagtttaaacattttatttcaacttgaaacacgtaagttggacattcgtttaccaatgatctgatgtccagtcaagaccttttatttaagtatattttatttaagaagtttccagaatttggggtttagctttgtgtttttaaaaataaacaatacctatttgtaggcattgtctcactggtttgttatctgttaaaggcagtcagtaattaaagacacttgcaaaacaatctgattgtagaacttctaaatattttcgaagcttcctccccaatctttttgatttgtttcagacatacccataattcaatagcaatattgtagaaattcctttttattaagttcttacaaagcatgcatcgtaattttcataaagcaataatttttggaactcatttttattagataatctaagatttatttaaattatgtaattgcaatagcaactacaataggatcaaaaggtttgggataaacatacttgactcttgctgagcatataactttactagtgggagaagaatgtacacatattatagaatggctagtaagctacaagcttttaatgtatggtgggcatcagtcagcatttatagagaaaatggaaacattttcttaagtaaagtttcgctgagagagcttctactctgtttttcaagaaattaggggagagagagaatttactccttgtctgtgaagacatgggatttaagctatgtgtatcacaggacttgaaacagaaaaaaaaactctacagatgtttttattttacaaagttagttgggttaaatattgcccaaagtttctacctgaaccatcaagtttggttttcataaaaagcttttaatttgtgagaaaaatgttatttgaattctttcaattacatcttatcagattttggtgatgcttttgaattctcaaatgtttcaagttgcaattctctgttaagatttattacatcattatcaaaactttgtattaagaaaagagtatatctttctgaagtcccgtagtacatattgtttctgccattcatttgatgcttatatttctcatttgctaacatttataatcatctgttcttacgcaaagcagtatgtcttggtggagaggtagtggaaaaaaacaaaaaacacccatgaaataaatctgtactcaaagaattcagcttgcttaacttcccaactaagtgatactactttggggaaccataactgctttccttactccatcccttttgtttcacagtgccttgttcacagctcaattatttgaagtctttatagatctgtttctctcttttgttgtttctgctgtacacctggttgtctttgacattacttctgccagtctttgtggtcacaagtgacttgtggagcattttaaaccaagttcgaagcttgagttttgttgtaagtctcggcaataaaacccaggttataaatctgctgaaggtctcgttatttattattctgctcttacccttagagtattgctttttgaggtctcagatgactgtgaagagggctccctattggactgtgcaccttgtgtggacattgaccttcgatatctgccttcttgcctggaacttttcaaaataaaagctcaagtttgcagggaaatgcacttaggaaacaaaagcaatttccctgcttgcttatctttcagtggttccattttccttcagttttgcctagcaattccttattatcattccagctgtttgttgcttttaagaagttatttatattttatccagtatttctagtttgtttcagcagtagtgtttgtctgaatacctggctcctattagctggaaacacatgctgttcatacaggtgcttagtgttttggttgttgatgtgatttagaagtgatataaagaccatgtcacacaaaaaagctcaaacatgctttacctctgaaaatgtggtttctaaagaagattttatttaattttatacttaggtttccatatttatggaatatgagtttgcacgagtgggcataaaatgaaaagtgctggtcatgctgttattagtccgttctcatactgctaataaatatataccagagactgggtaatttataaaggaaagggagatttaatggactcacagttccaaatagctggggaggcctcacaatcatggtggaaggcgaaggaggagcaaaggcacatcttacctggccgcaggcaagagagtgtgtgcaggggaactgccctttataaaatcatgggatcttgtgagtcttactcactatcatgagaacagcatgggagaaacctaccccatgattcaattacttcccactgggtccctcccatgacacgtggggattatgggagctacaattcaagatgagatttgggtggtcaaaccgtatctcatgcctaaagcaagaaacaaggaatccctagcaatagattttatttgcagtttagttaaacaacaggtgcaagcatatcttatgtctgttggtaaagaagtgaaaatggatcacagaagctctttcagagggaaaaaaagagttaaatatgatagcatccagaagcattaataatccagatgtttacaacttcataaaaattgccaagtacgcatggatacaatagtcattttcaccaggtgaaaaatgaccagatggtagcacttcaattctctggtgccaacaatgcagccacagggggattgttttttgagtggctgtgctattgaaacatgttttataagtattctatatttatcgtagtatctgctgcacaggactttactagccatagaattggttgttggaattgctgaaagtgtttatgtttgtgttttaacaataagggctttgggttgggaaactggagacctgacactttatcagtgatttcatgtttgatctatagttgatttggatgtgctctaatattacattttgccatttttctattgttaattttgaaaaataagaaaatatttttgctaattatttactggccaagcatactgaattcatggtctataaaaagtacagaataatagcccagtcatttaaaatcacatttacaggcttttaagcattattaatttatatgtaaatacaaaattattttgtgaaaatttaagatacacatggcttaaatttagagtcacataaagaataacaattaaaaatagttctgtcccaattaggagaaatcaatctttttcttttgcaaatagtctaattaaaatattctatcaaaggtttatccaaatgacacatctagttgacactgtataaatgtaaaacttacaggtattgatcaaacttaccaataaaattgtttcccttgagatgctaaagctgttaacatataatttctgagtaaaaatataattactaaagaaaacaacaaatttcttcatggataaaggcacgacataaatgagcacacaaaagcatcctcagtgaccttgagggttaagaggcttgagattgaattttcacattttaaccacaattcagtgcttttcatttgaccaaagtaaaagggctaagaaatatacccagagcttttataaaaagctgttacaaaccaaaaggggaagttatatgtgttttaaaacacggcaataaatagaggagttagatattaactgtagtgttccaatcctttaatagactatgaggatttcttatccaaaatcagtatattttttggaaaaaaaaccttgtgagcaatagaataaaatatcatttatgagaagaaagcagccctgagaagccatttgaagatattagtttcaaacttgggctaagcatttgaagattttgaagcagctttctatcaagatgtgaatattagtaattgcagtcactgtagattatacaaagtgactgaggtgttccaggaaggctgaaaagaaacacttctatggctggattttcatatccatgaggacaagggttttgtcatttttgttaccagatccccagtgcttcctggctggctcatagtaggcctttagtaactgtgtttgataagaagatacaaccataaaaagaagctgtgtatgctaataagatggggacaataagaaagtttttattttaaataaaggatattttaaaaggataattttaagttcaatccctaggctttcagtttaagatactattatagtaaattaaaagaatgattttaacatcctggggcttttctgattctggaataaatttctttattttctgtcaaagagagcacacaaaatacatttgtttaggaagttctagtgaggggattttttcatcagaagagttttcacaactagcaaatccagcctgtttacacaggcagactccacaagctgggctgttgcacactcatctttgtccatttgggaatgagtgattgaggctggagtggggttgggaggatgcagggggagacagaatgtgtatggaaatgtcttttgcttctgaactgtggctttttcagtgttcccttctctgtacctttcccttccctctgcccactgcagtgtggctgctgcctgtaatccccagacttcctctgtcataataaagggaggtctgtggtgacagaatggtcactatttatgacctacactttctgcagctctatcttctttatgtcaaggggtgtcccgagggtagcttttcattccttgtctgttggccattgttactagctagaaattttctgtgaaacttcagaagtgttatgagcttgagaggcatacacttggggggtcttgagactgcttctacatctccttctcagcctatgaaaaccgcctgttttgatttggagctggagtgtccttgtttcctttcctcaggcaggagtagaaggaagatatcctttgggcattctcattttagccaaatcatctccttgtggaaacattcttatcacaagaaagtaggatctattatattatgagcaagcttttcttggtaattttgcattatcaaattggcttttgggtttggcttcaggtaaaacaaattgagagtgctatgccattggactcacttactcagtttgcttttccttacctcgatcactcattagtcccaaaaaacagaggaagcctcaactatggattaacaccatgaacttgattagaataatgaactcttggcacatagttcaaacatagttcaagtgagcacattcttttttttttttccctgattaggtgatgttttaactgtctttgtagtgcatctgcttctctttccacttagcacccataccacatttgtggtagagtgacgatatatgctgttcaattgcatagctgcttctcctgggcagggctagggaaagtgaagggggagattaagttgcatgtggctagctcagttgttattaaacgctgcctgactgatgcctgatgtctgcagaggattttctttggaatttgatcaatggagtgctggacagtgaggacagcaaatggccattttatctcctgtctttaaaataaaatatgccctctctgaaggacagtctatgctggctctcaagtttaaatgtgaacggacagtgtgctccttacctttgaaggcagacacaagtttatcccattgatggtcatgatgctttgtggaaggaatcagcttttgttacgagctcaaaattcagccagaattatatctctgctggaggtttgatgggaagagccttttaatgtggtgcatgcatcatttcaatggctgtgagctcctggaattggaacctggtgccttgtctgtgcagaggtcagctggtgagtatgagctactctctttcctcagagaactgataccaattattttccattcaaatagaaatcatagttaagtttgagcaacacaagtatacaagaaggaaagattttaaaaacatcaatttctcatcagcttactactgaataagctagttataaagaggcaaagttaccactctgtgtaggaatgtctaatctgcctagctttcttaaaaggattatgtgctactatctcctatgggagcaatctgttccttaattaaggaaaagagaaataaaaatcacacactacgaatggacttgtgatgagtttattttgtttacaaatatttatactaattgtctgggatttcctgttttgtgatttgaatagtaagagccctcaatgagggctttttgagtgggttccttttccgaggtgagttgatttaagagccctgaaccttggccctcctgcccttgagagccatcccaaggaaagatacctggaaaaaattatttggcttctagtgtcctcatctataaaaacatggtgactctgcttctctgtcacacttaaagatattatgagaaaatgtaagcaaagtagtgtaattatgattcttaaagatgtggcaatcacagtgctttgtgcaatgcgtatgtcggtcaatctaacatctaacaaactatcacctggttcattaccttttctttatgagacaaagataaaaagagctgtcatacttgtttatagaaagtaaaagagtcttagagactaagactctgttaaccatccctaaatttttttttacttattaagttgaagtttaaaaaatgtgtaaaaatgtataattttcctggcattagaaaacaacataatgaaattaataactgtttgattttacaagagagtctatattgagctcattaaaagccaatgaaataaaaggttttttttgacaacaggaactcctcactttcttctctatctgtgctgatgatttttcactttcttaatgaggtttctagaagaggagaggatattttgatagtgtatcagcagattctaaaggggcagtggaaaggtcttgtgccagaagaagctggagtcaccctcacaacaggaaaaccattgcaggaggcttagccacatttccttgggactcatgctattaagctaaatggacatccaccaatcaagtaagacttgcttgttgcgaacatttttttaaaagtagaaggaaagaaaatgccagatggcattcagaacaccctgtgctctagtcttgctgctttccctgaaccaccttctttcctaatgactgctttgacaccacaacagctgattctccagagtacttcagaggacaaaatgtttgaggtatgctatgtcaagtggtagacggtgactcccctggccaaggagatagaagaatcctccccacatccacacattatctttgcagaaagcctgaatgactatgtgtatttctctgtaaatatgtaaaaggtttttcagacaagggagtttgaagggcttagatactaatgaagctgatttgtttttatttttgtttttttggaacatgaattttcagctgttcagatcagagaaagctaatgctccccatatatgataaaaactgctcccttctctcccttcctctaccctctgtaagttgactgaccatcatatcaacaatacaacactgatccatgccatggtgattactgttttctttgactttcgaatcagattaagtgctaggttctctgtactactgtggaatgcattttgcttgcttatgggatattttattaatcttagtgctttcaactcagtttaggtaaaaggaaaaatgataaattatgttatataaactataacatgtaccatccacattagtattttccctcctagaagagttgctctcttactatctttatgtagtgcaagaaatgagactttacgttcttcatttatggaagcagatatgtcataagggttaggatacaaaaacatatcattttctaggagagcatttttaatgttattttactcttttcctaacaatagcatatatgtagactcagattatattgttttactatcaatgattataatagtgaaaacccttctcctaaaatgcaacagttgtgtgtattgggaaggaacgtccatagtcctctatatacaatatagtggtatgattctgtctccagctaagaatgaataactaagaagtgagtgccatccttggcatcctattagacctcgataaaactatggcagtataggtaattggaatactatagagaacttcatcttcttgagttaacagcttgtatcctctttcctctttcattgagcctccctattgggtgtatatacagcaacattcagaaatactaatcctgctttacttcatcacattgcttttcaagtaaatttgcatttaacaaaagcctttgataattaataatgagtacctatgtgccctctttgagtgataaagagtggcttgggtggtgcctgctttcctctttcccattctctatccctgccttcctctccctcttttgagctccccgctctttctcccaggaaaacctcgctgagcccagattatattgtttgttcactgacagctcttttctatgcttaatgcagctccctaattcagcctcacgtggatctgtaaatggtacagtgaggacccggctacttctagcccttcccagacctgctcacccctgtattgccacggcagtggcaagtaactccaactgtgctcctcttctcccaaaacagcaacgtcgattctttactttaaatgaaccttggagaaggaaagggctgtgagatgaaaaaggcaggaattcatgtcatgtgctacagcagagcagccgtagcaacggcagtaacagcagtagcacggcagcagcagcagcagcagcagcagagtcctttagcgagactgcaccattttcttctcaccctgcatagaggtgtggttggaagcagcaataaactacccaccccctagcagtttcacagaggtggcctcttcctggctccagtcagaagacacagtctgtctggaggagtccccaaagactgttccaattggtgatgtgtgtctaaggatggctttttcaactagtaggatgcttctctgcacttgcagccacccaactgctgaagagctggaagtctagtgctccgccttcccccgggaccatttctgagtgtgggtgcacacctatgcctgtgtgcgtgcaggtgtgtgctgctggaggtctcggtttgggaccttagttcattgtagtgagttgtgggtgctgcagaggctggagcaagattatgacctagctcgggggcggagtggattatcttgtgagtgttctggctgccagccattgccctggtggggaaaatcacatctccatagagctctgaaatcacctggattgctggggagtggaaactgatcctctgctactgcttctgctgatttcctctgcaaaatggctcacgctgctgcttctattaaaaaagttcgagaggctgatctggatgaaaaggaaaaaaatcttgagagagacagaaaaaaacaacggaaaatccccagagaacgtatggaacgaaaaagaaaggtatgaggagcatccttttaaccctctttctctgcagctctgtgtagcaccatcagcctcagaactggcaacttcatcctcccttccttccatcattcccctgcaccatttctaagctcagtttgcagcctagagctcatgcctacatttgctgcattgggaggagatgcttgagcagggtgaatttcctttgctttgaccaagcaaggcaaaaatgcctccacttcatttttctttttttttgtctcaattatctttatttaatctcaaagctaggtgctttatctcttcaggctactcttagtactgggcacagaagaaggaaggggttgatttacggttggagggttaaagtattttcttcttcttgttcctcatctctattactctatctttagcagtgtgtcttctcactgactgtatatttgatgtagacctctagttaagaataaactaaagattttatgtgctctctttttccctcctggaggtttacacccggttttcacttcttagtgaagctgcactaagaatattggtgcagtgagctgtgtctctgcatttttaaaattttaattaatttttttgttttctatcattaatcctttaattttcttttctgaatatggcaatgaaatcaaaacaaccaaggttaaacaagggatgaaatgttgattccttttacattgaactattgtttctttctcttaaaatattgttttcctttataatagaaataatcttacaacttgatggaactgaaatactcatttagtcagtgatctagatctataaagaaagacctctgtaaatgttttaattaacaaagtaggtcactgaataatttcagaagatgataaatggcttattacattagcagagcattaaaatagtggtttgtacacaagctgttgttaaacatagctctgggattagggatgcaatggggatccatatacttaataatccatatgctcaatggactctttttttcttccataatagatatgtttacctttcaatttgggggatgttgtctttgcctcacttttggaaagacacttgagaaccaacattgagttgagatcttactgcatagggattcattgcatttcagtttactacttatctcaccaccaactagatcaaatgactgttactaggctacagaaataaaattagcagtatataatgatttcccttctggggaaaactttcatactgcttgtctgacctttaaaaggccgtgttgtttcaagattgcattaattcttttttttagtatcaaaagtattattagccattttgtggaggtcgacttccttcttgacagcgactgcagttctgtttctaatgctctaaatggaacattattgtataaagaattttctgtgattatatcttttttatcttttgttctccaaaacacagtatatgatttcttggctagcggcccttgtcagcattcagctgtgacctagcaactttgcttagctagagtaccatgcatacacctggaaaatcacttgttctcactctggtttgtttctgtatctagttgaatgtttttccctttccaaaccttgataaaaacagaaaaactgaaaaactgtactgttaaaataaaaggtgccagttgttgttgagaatctcagttgcttggatgcttcattgctttagcttgaatccagaaccataggcaagattattggttagtaatgtggtcatatgacaggatcatctggtcttcacatgtagatattatatctaagctagaaccagagtaaattaggaaaataaaggcatagctagtatttgtccttgttcctcttttttcatgtgcacctattgctcctcctcccttttctactgcagatatttacacagcacaacaaacttgctaaaagagtgggtgtgctttttagctatattatatttattttctagatagacagtccctcccccaaccccaccacacacacataagcactgaaccagttttcaattttcttttgaaaaaaagaaatttacctcatcatcataccttaaggtgtacatcataccttaaggtgtacataccttcatgatagttcatgaagaaatgaaaaaaaaatggtagcctattagtggcattctggaataccatctgcagaaagtaattttaaaattatcatcgtttatttgctgatgccactttatcatcataagggaaagcatcagttgtagagatgattgagtatatcattttcatatccatttgtagtgcctcttactaatgaaactgtttatttgaaaaattcagatgagatccaccccaatgcagataaaagccaattatggggcttgaaagaaaataaataagctgattttgaaggatttttaccaaggtaaagatattgcacattaaaatcaattaagcagtcacatttaatctttattttaatattcttttgtaaacttactgttaattaaaagaatatttgtattattattttgtactccttaaaacatttaaaattaattttaattatttgtaaacttgaaacatgttgcatacttgactataacccctctaccaagttgccagtggtgttgtattaaaacaatatatactaagagatctactttcaacctcattataagcagaacttatcttactataatatgttcagatttctttgggctatactctggttagctaatatttaaatatggtatagtaccgaatatctattgtatgtgtcatactatgtagagctaaaataaaactaagctttaaacaaataggcaaagattaagatgagttaaactaatttagtatgtttgctgaagagttcattaatctggaattttacaaaaatcagaatatctctattctaattattagcttatattagcaagtaatttctttgtatgtccagattttgccagtttttatgttggaatctgagaattttagaattgaggaggatgccaacaaaaaatggttaagtgatttatcagcgttttcacaaatttgcgagacttagttctaaaaagtgatttgaagttgaatattctttccacaactagatactatttcccaactgtacgttttttaaaatttgaaaaatacataatttttagagaatgagtaaacaaatttattcttgaaagtaaaacatatatttattttatttattttaaaactttattataagttcaggggtacatgttcaggatgtgcaggtttgttacacaggtaaatgtgtatcatgggggtttgctgtgcagattatttcatcacccaggtgttaagcctggtaccaattggtgatttttcctgatcctgtccctcctcccaacctgcatcctccaataagccccagtgtgttgttcccctcaatgtgtccatgtgttctcatcatttagttcacacttataagtaagaacataaagtatatatttaaataatatttatcacttaaattcaggatcaccataaattttcaaataaatcaatatgttcaccatttctcagcacagacaaactattgtccaatcaatcataatgtctacaatactcactggaatcatatgacttaaaaggcaaatgtatgactagttcttaacatcctgatgcttaaaacattctttttattattttaatttatactattaaaatgccagagttcacattttctgaaaaaatatttgtgatcatttattaagtacccatgtggtcatgtatctgacactttacacacatcgtgctgttaaccatgataacaatcctatatattaggtattattctctggatttcacaaacaaggaaattgcttaatcacacacaagtagcatgtggcagagttgggatttgaatccaggtctgtctggctctaaagttcattggagaaaaaaagtaatattatttcttggtcttgtacctacactgggtgtagattataaggaaatcacttattccaccaatgcttcaatttcttcacttctaaattaccttcctacagctgaaagaaatttaaatactgtgatagtaaattaaatgatgaatttgagggggaaattatgtaaattcgtgttgggattctatcaaaattgcaccaaaatatttcatgagatttcttggaaaatcaactattagaagtcaacatttgctcttcaaattgaggtcaattactggcaattatagactatgatatataatcattttttgtcacaattttattaggacttcaagatgtatttgcaaatctacttttattaaactgataggtgattttgcatgggattaagtagaaaattaaaaaaaagcctccttttgagttgttttcatttaatttcacagtaaaaggttctgattagttatttgcttttaaaaatgtacacagttattatcttggtgagaacaagacttatttctaggataggctttggggaaatctccccccccaccacattcttcttgttcatttgcttatttaattgatagcaatgataatacttattgagtatatataataaagttctcatcaagttgtaacgggacatggagcaatgaagatttttagaagttatattagtattttttcttaatttaaagtgttttatttgcaagttgagagtggaatgtattctataactttggaattgtgttataagaatgagttgaaagtgaattgtgttataagaatgagttgaaagtgtgttataagaatgagttgaaagttgtgttataagaatgagttgaaagtgaaacatagtgtaaaactgagcatgctttccctggtggtctgtgggtaaagactgcagtgtaggaggagattggacagcctagtcatccctctcatttttgagccttctgcttgggcactcagcagcctgtttctgaagggaagtccaactacggaagttgcaacacttagtcaagaaccatgtatgcacaaagatgtctggacaccaaaccaaatacactgtgattaaaaatacaagtcacagccagaataacatggcactgtataatgtgttacattctagaactctacaaacatgggaaatctgagtcaacagtttttaaaacctgcatggaattgtctttatgttaacttcccagaaccccttcatcagtatgtcagtatttccagaaaccacattaacataaagttgattggtgctgtcttgagttttatctggacagatgctcttcttatgtcttagtgtctacttatatgtgaaaattcaaaagttttattggtttgctcttcccattttgagtctaaataaaaatgttcagccatatctatttaaatgtggtagtttccatagaatcattattattatttaaaacccattatctttttctttatcactcctctgatttctcttcttagctcagttcacaaatcctttcttggctagaatcattatctttaaataaatgacttgcattattaatgacactcttcaccagcaccataaagctgagtttttattataaataaatttatatatttattaattataaagaacttcttttgaccattgcatgggtgactaatagcttaggtttacagctgtcaaatttgtgcaattgtggcaaaaatagtcccaattgtatggcttgaggtaagttttaagaagacagttgaaagaaaaagaaaattttaattgaaaaaagctactatgagggattgacttatttttggaatctaaaatcttatacacactcaatgtaatttttttcctattttattacattaatctgtgtttatataaatgttttaatctttaaaaaatcagaattaattctttcgttacctttattatcaaacttaattttattagtccccttattcaccaattgattaaaaataatgatatttacactatattttgacatcatcatgaatacagaaaatattttatagaaagatttaagagtcagtgaaagtacaagcaagttaagacttctactcatgccatatttaatgatctacttgtgtttatatttttccattatgccactcttttttatttgtatttctcaaaataatttcttctttacaatagtctcagtcacagagacattatatactaaaataaagtgtaaagaagacttttctcaaattctggatttctgcataaattgctagtgaagtcatcagctatttgagtgtgacccttttgctccaaaggtgagctgtgattttaaatgtttattgtggaaagtctcaacagaatcatctggttctatcccattcataataagtcagaatcctggggtagactggaagggaaaagagaccataatccatatatttttaaagctcccttggtgattccaaccagggttggaaatgactagaataaacatttccattcccccaccaacccctactctactccatcttgaaatttcaagcgatcgtagatttacttctaataatcagtatgactctaattttttcatgtgtagataggagacaccctggcaactttctgaaagtttaataagactaattggtttatgtaataaccaattaattctgagcacagaaaggaggaaacaagtgtttaagagataagttgcaagacttcatgatctgcagtttgactaactttgccctaatggaataatcttcaggaaataaggttgtgtgtaaatgacttttatgtaactaagctcaaacaggtggagaagttatccaagctaagtttttaaaggaagaccactacattgtgaatttaaaattatgtcttaaacacgttatgctgttttgaaagaactcaagttagtgtcctagggatttaattggtagcttagcagccttggaggcctcaaacctttggagaggtcagcacttctaggactcctaacacaagtcaacaactaccttttgtgttttgtacttgactttgatagatcttttcaaaattatgtaatatgacattaatttagtaagaaagaaggaataagtaattcatagatgagttatctcccctaattcttcagatattctctttcaatactcctaactcttcaacttctcacagtgccaggatcttttgtttggttggttggtcagttgttctgtttctgtttttgtttttttcatgaaactgctctctcactgtctttctggttcaccacagtttccagagcagtcagaaagggattccttactcagttgtacaggattctgaaatgtactttttagcatgtacagttggaattccttcttccatgttcctttacttcattagcaactttgccagggaaaactcttttttctctcattagagtttcatttatatccaacttagcctttttctagagaaattatttcattgtatatcattattatgttgcttatcataggggaacacctcaacagaaaacaatgtaagtagtattaaggaagagaatatgtgggctgggtgtggtggctcatgtctgtaatcccagcactttgggaggctgagacgtgaggagagcttgaagccaggagttgaagaccaggccaggcagcatagagagatccccatctcttttaaaaaaaaatcagagatatgacaatcattataaacatgtatcttaatctaatcaatttatttggttaagactaatggtgttatttcacattaacctatatttcttggctttttatatatttttgcatagagacttattaattaccaattttaactcacttgtttatagtttgtctgtaaaaaaagccttcaattaagactgaaaatgacctctctttgtgtatttgaatgtaattaatgatggtttttccaaaagtctattttttagcgaaaaaacttaatctctatgttattttttcataaataaataatgttaacctcacaaacatgaattctaataatctactttacttttattattataaagatcaaatatgatttttgcgtttgaaacaaagtttagccgataaccctttcaagacattcagcaggataagaggtggatgtgaaatctaagattataaaaaacaggcaacataccagaaagctgtttactaagttaataaagtatatttatacaaaattaccagatacttctaaagctccataaaaacaaattcaggagacctctgcttaattctgtctactcactacaaccttgggtaaacaaatgacctcagtttttgcatctataaaatgataaggatctgagatctgttagaattcttcctgtctttatgcttctgtgtcattttaattgtttctttgcttccctttattattataaatgattaagacagttggtagaatttccaggtttttcttcatttaagataaattttttttgagctgacactatgtcgtagacagagtacctttacccaaggagctcatagacctccttgggtgataggaacttttcacagataataagaatgaaatgttagttgtgccactatgttagaattgagattgtctatttttgtttatatgacgcaagttttctttaataggtgttacctgggagatgaaataatggaaggaaatagttcctgttgtggtgcatgaaattttatggaagttattaagactgggtatatacaaaatgaagtaatcatataaagctctatggttgttttgtatttcagatactgatttgagccattttgaaggaagaaatttattgtggttccctgagaaccacagttgatttctcctgaagtttattctcacttttcttttaggtactctgtacactgataataccaggagttagaaattcacagagaaatatcatcattgtttaattaatcattttacaaagatctgatggcagtaatgatagctgcctttaaattgcagggtgctgtaataaacaaaagtccacagtaaacgcttaaacctcagcaattcacaaacctttcaattgtacagcttagtgaaaataaatctcctgagttcttctacaggtagtagtacaaacttccttatttatggctcctgcctcaaactgggccagaatgcttaattaaaccatgtcacatcctaaaatgactgaaaccaataaaatgtaagtggaacaggttacctggaaacagtaacttctttgaggacagaggttacttaggaaatgagctttcgttcagggtggtcacctacaaaacatggggcttcactgtgggctccgagggacaggaatcaaagcctgggtgtgggtgggagagagaaaagccatctgtgaaatcacacgtttccattactggggagaagggagacaacaaaggacccagtagcagatgccaattctctgactacaaacacattatcgaatataagggcccttgtatataacatcaagcactcatactcagtctttcaacacaagggacaatattttagaactttcagctttcatactagaaaagagaaccaaaatataaaataagactttgtaatatgctaatatgacaaatattttgccattgaaggaaacttgatgattaagactaattcccattaatcactgtaattggccttcacatgagggccttctgggttatgtattctttagtaagttgtataagagcatctgaaacaatttagtcactccaatgatctttaaaagtttgtaaaactttatttttgatcaagaaattcagagaatgatgcttcttagttttaatcacattttcacttacaatcaaacagaagctcttttaaattatgcttgttttatttatcttctttcatgtcttagaaaaacatttgccatgcttcacttttccatcaagcatcctccctatttccaaagtcggttcagatgtatataatatatataattcagggtattgcagtcccttggatggaagaattatttgttgaataactgctatgagccaaattttaaattgagagataaagattatttactgagtaaaaaaatattttctctcaagtaacttcccttttagatagatatttaaggtcaatggcaatggaaaaattagagtacagagctagattaggtatcataacttttaaattttctttctttttttgtttttttttttaatacatagtagatgtgtatatttacagggtacatgagatgtttttatacaggcatgtaatatgaaatagctggttgcttttaagagagattgtggacttgaggataggtaggtggtagggttggcttaggtggagagggtacctcagaggttgaacatagaagctggtgaacagcttggcatgatcaaagtggaaggaaggggttggaaataaagttggagcacttacagagcaaagaagtagctgaactcagtgaagcaaaaaataagcaggtatggaaggttcctgtgatgaagaaagactatgagggggaagtgaagtgtcaaggtcacccagaagactgttatggtaatccaagagagatgaacagggcttggattggaatggtcataccagaagagcagcagggaggaaaacaggatggttatcagcactcaactaggaataaagaaaaaagagaagagtgaataaaaataactttaaagttatatatttcaatgatattaaaaaatgcttgtcatcaacagaaatacaaatttcatgtgcaagtcagaaggaaagtaaaaacacattgctttatatgtggtaagtttgaagtggtggcaggatgatgtttattttcattaattgcagagactttatatgtaaaaagccaataaataaaaatgtgatctttctctttgggtatagtaggaagagaatgaagtttagagtttggagtccttaattcaaatcttagctctaccaaattctggatgtctgatccctggcctcagttgtctcatctgtaaactgagttaataatgataattatttttaaatgcacacgtatacgaaacagagtaattctaaggattaaaatgaaatgatgcttttgaaagcacttatgtgcatagtaatattacttattatatcaccatagtccccctttttatgtgagaggacaaaaggaaatatgcttagtaaaatgattaaaaatgtccatgaaaatatcatatgaactcgttgttatttatttattttttttatgagacgaagtctcactctgtcaccagggctggagtgcagtggcgcgatctcggctcactgcaacctctggctcctgggttaaagcgattctcctgccttagcctcccgagtagctgggattacaggcacctgccactacgcccagctaattttttgtatttttagtagagatggggtttcaccgtattggccaggctggtctggaactcctgaccttgtgattcgtccacctcggcttcccaaagtgctgggattacaggcgtgagccaccggaactcgttgtttttaatatatacacagatagatataaaaacaaatacgtagagttgtacgttgtgtgtatacagacatgtatttcctacctcccttcacttagagggcctagaagcaaggatacttcagtagcaatgagcaaacctagcctgcatcttggtttccaaacataattttccaacagaagaaaatataacttcttgggaaaatggctgatttgagtaagaacaggctcggaaaatgatggggcatatcaacctgaagcagctcccaatgactgaatacacagaaatctgagcaacaaaataactaataaaaacaaataataactcatagaataaaagaaatagcccggggtctttactaatagaaataaataattgaataaacaagtaaataagtggaggagaagggacagatttttttatagtagaattccagtgaacaaatctagaagaaatatggaaattataactagtacaaaggcaatcagcaatctagcttgtgtttaactatcaaaaattgtattagcaaattgttttcaactatagaattctgtaaaaattaacccattgtgtttaagtcatcatagagggaaaaagttgagacacaattgctttgtataacttggaatgacttttgctggctattgaactcccagatgtatttagaaaaaaagattatgttatgaaattgccatttttaggtgtttattctaaagataaaatggaattacaagtgcaaaacagaatttttgtttgtttgttttaaacgtatgactgcaagttttacataaattattatttgagtaaatagcacatgcaaggagctgctatatagtacattaaatgatataaccaaaataccagaaaactattttgttcatagtaccatttttcaaatatctgaagttggtctttattaaccatatgtctgcatgatactgaacattgtacttttgagatatatgatattggcattgatgtaatgcatttcttattttactattttattcttgattcctctttgagtaaaataaacttaaaagacccttttttgaggtaatgagtggaagtagatttttaaaaatttgttggtgatattaactacatgatgttgaaaataacaattacaactgacattcattgaccactttctatctcccttctgttttgtgaaattataactttatttagtttgaattacttagataactgtctcttcttccacttctttttgcaactaagacatgccataaatctgtgcaggtatctgtataatatgctgtttctgtttcagtgttaataatttataactgagacctatttccactttgaactagggttcagtaggatgaaaactaactttgtcttttatttatcacacttgattgtctaataatttccataagcagcagttgctctccacatacagatagaaccctacacctaacgaatctctcccttggtccctcctaaaaaggcactccatttctcattttcattaactttgctacagcatggccaaactcagtaaaatttttttttctgttttctttgtctttaatattgtctttaatatttcacctgtctgtttcaatttatcttggtaaaatatttagatatataatatctgttcacttttgaaactaaattttcagttttagtcaaatgtataatgatactgcaagttgagcaaactgtgatcaaagaccatgatagtacctgtattaatgttacatgcgtgttctttacatacctaagcagtatagtgacaactgagtgtgtttacctgggagaactttaggtattttccctaagcccatgtactttgaggttttaatgtgcaggatgagaacagcatccagccaggaacagcgtaatgccccgatgtcatgggatttgacaagcttgctctgcacctaataaccataggtttctatatcacatcatctttgcctaagacataatagatactctactgattctaaatatccaacactatttttgtgtcctaaacttaaacttcaaatttgtcacaagttaatctcctgaatcaaacctaggaagagaagtttccttaggcaacacatagattgtaccaatgcataaacagttatttgagaatgaaacagaaccagagctttgtgctattttcatttttataaattaacaaggaaattaaagatgttatgaaggatgagacaaaaaaatttctggaaaaatatttttgtcttcccttgtaccatttctatttaaatgttaatgcactgtgtttccatcttaaagtcaaacaaatgtttaaaaactgtaacagtttttaatgaatagttttattaactactaatcctcctgttttcaattcaaatttcctagtctttgtagagcttgaaactttcctctgggatgcatgaagtctactacttcaggctggcaatcctctctcataactcctatttgcactgttttcctttccccttcatctcaagccttgttcacactcagtgcctattggtggcatgtttagctgccctgaagcatagcctctgtaactttccttgttctctttcagtttgactttgatgaatgcaatgctcctgcaatgagaaaactgtacacaccagtgacccaggcatctgaattgtctgggaataggctgcattactgaaatttagggtctactccttgttagacatatcagtgttccaatgacttataaaacatttgatccctgatggctgtaggtttctcttgtttgaaagctgctaaaaagcctgcacatcattggaatgcaaaattaaaacaagaagtagaagtgtgaagctcatttagacttttaaaaactggtctaagtgattgtggcatgtcaaagtactttatacactcctaagtggagacaaacctgtgaaacagaacaccaaaggcacaattgtgttgcaacaagcagtatattgtaactgagtttaaagccccctaacattcctgcacactaaagcacagtagatttaaataggatctttgtgattccacatatcctaaagaagcagtttttctctgtgtgaaaccacatgcattttcatagaagattcagggataaaaacacatccgggcaagatataagagtgaaatgtatagacaaaaggattaagggctcaaaggcttttttcttctttttcccctttcctctttgagctgaattatcatttaatgccgtagactggataggtcaagagtttgactgaacagagtcataaagtcaactaggaaaatattttttaccatataaaagaaaaaatagaaaactattcagagatgtcacaagtatcagaccatatggtgtaatgccacttgattagaggtttattttttctaattagctcattttggagtagattatttgagaatactcatccttggaattgttatgatatgatgtatatgcacatatgtatatatgtggacatatttatctgtattctatatagatgtatttatcaaaatgcatttccgtttttatatgttttaataatgtctctcccttcacttttttctcctggagttttcaacatattgaagttacagtattgcagttttactatagtacatacttcaaatgtacttaagggaatgatcatttgaataaaatttgactaagggatagatccttttaataagtatgtgaaattgataggaaattttttagattaaaaagtactgaaatttaaggtatagaatcattccacagaactactttgtaccctggaactggaccccgtggcatgatggtagcttctcagccagacggagcccatgagatagatggctctgacaggaacatttgggatctgacattagatctgtgggtggggtgaagagaactgatctagagtagatcatactgggtcctacagggtatccaggcatgatatcacatagttgcttcatccacaatgtaggaaatagtcaacattggggttctcactccagcagggggatacagcaatggggaattccagcagccatctatacttgggaatcaaggaaaaaggggctgatcatttgttcttggccatcatgatactacctgctgatattgattatgggacaaagcttcagtattgggaaagaaaaatgttgtgatgattctaccttcggagctgtactattattatacttacaaacctcttcatggcagccctccagctggaaggatgcactagagttttggtcatccaggccaaattcagaagtaagagttaattctcttcactgacaccagcaagagaaaaatggagttatattttgagggcaacgtaattattggttgtttctagatatagttgaaagtataaggacttgttcctaaatggtaagataggagagcaggaacacttagttttctgaagatgacttcattatgagtcaacattagatggaagtcgaaaaaagtttgaccttttattctgaaattaaaggtgaatggagacagcaggtgagatgtatcaagggtcccaggcatgagaaactgatccagagaagaatgagagcatgtagactctatactcgactttttacaattgtttattatattatttaattctcacaatggggtagatattctaaatctcattttttaggggaagaaaattatgcttgaatattttgcttgaaaaagattttcccctcaaatttcatggcaaataaataccttaagtgacagaccccagatgccagattccaaatcccatgccttttcgctaaaccatgctatactaccacgtaatgtctgatttgtagtatttttaacttaaattttagggcagataataaacaaaccttagacccatctgattcaaaaagagaaaaaaataatggagttgaggaaaaataatcatagttagcttgctgtgcaatgctatatactggacactgtcctaagtacttaagatgcactgacttatttaatcttttcagcaacaccatgaggtagaaatgattataactcccttttgtccaatggaaaaagtgaggtttaagaaggaaggaagaggtaagaccccagatgacttgaatctgtgcttctccaactgaccttataatgctataaagaagagtagctgggatgaaaaatatatatcaccaagttacacaaaaatatttctaacctttcaaggaacagacaaacaaaatagcagggggagtctctgaagaattatgatgtgatttacactacagcaaggtccctaataataagattacaggaagaaggacagaagagctagagttatcaagtgctgaaaccatctatactactagcacctccaatgatcaaaatagcatcaaggccgatttctaagtcttggatgtcatcaacaggaatctcttgttagagtagaagagaggtgaggtaggttctggcccaaagtatcatatgactggctagtttggagttagtttattaaactgcaatggaagtagctctaaaatttcctgaaagttgtcttttttttttttttttttttttttctcactgcaaccacagagagaacccaaggacaaaattcaaagtaaaatgaaaaaggagggctactgaggtattactcacaacaaatacgaaaagttggggagtgcatagagatctctgaatgcctcttgtgctctgctgaacaatgaggccaaggatctggaagacatctttataccataggaaaattgatccccccttatcttagtatggaataataataaactgaactatgttctccttgttccagagcaaggacaaaaaaactaccttctaccttatcagagatgtttttttaacacttgatctccaggtcagctaaaatcaaatgttattaaaatagaaaaggcatatttcagtaaaattgacattttaaaatgtcagtggttaatgaaagccatagtctcttttattgataattctttttttaggaagaatttaggacaaaattaaactgtcatgacatacttcttggtctactaaatattatatgacctttgtatttagtaaaacttgacaaaatcagattagaactttgccatgtagtttaagttatcaaaatatgaagtcagatcaattttatgaccatagaaacttaaaaattggaaattctaattttagacattagaagtggcatgactaaagttttatggtgtccatttcttcaggatgcacaattactacagttagcatatatctgaattactgatgtttcacagtggcaaagaatggagagctccacctgggtatttgaatgggttgttggtcatgaacacaagtagaaaatgcacatctttctgtgagtatttattgtaggctgataactgtggggtgtttttgcatttacaagatgccatattattggtggctgttgtctctaaaaggttagcatttgctttgaaggtaagacatgttagaagtaaagatacctatgaaaaataaagaaaaactgtggagagaggagcagcaagtgagtgtcatagattaaaggtaattaaagtaaagtgatggccacacagaggtgacagctgtaaggaggattagatatcacggtcaggcagggatctagtgatggatccatcactggaaaaggggaaccaataatgaaagaatgcagagaagctctacaggtggaaagagtggaatgaaaggagcttttcactacatgtaataccgtagaggcaaatgatggccaaaccatagagctgtgtgtgtctctctgtgtgtgtgtgtgtgtgtgtgtgtagacatttatgataagagtaatccttctggacctctagagaacaataattatatttccctgacattagcaatgattactctccatatgtttatagtgacactgatggatatcctgaaatatccatgatgtgatcaacagtcttactcttacctcatgaaccatcttgtggttcatggctactgatgcttttgtggccattggcatttttgttcttttcattcctcctcatgttcagatggccaccaacagatttggtgcctggaccaaaatcaaacatctgaaaatataattatacaagaactgacagaatagtaatgtgaccaaaacaaaatcatttttaatggtaattggataaatgactgcagattgctattctcggagattcattaaagcatttctgtgagtacatcagtaataatatgcatttgtctctttttatttaaatgttgtgtttgggcctgcgtatagtgctgaatgaatatttgtgagaagaatgaaataaatgtttgcataaaccactcatattttaagtatgtgaaggaagttttttttattgctcatttagtcagtaatcaattatgagtgcctgctatataggggcactatcaggagtactagggacaaacagacaaataaaatacagtgtctgttcataaaaagacaattaaaatacagggtaacaatcatcctgatggctctgtgtccacagcaggctcctaatcttgttggccaggcagggcttccaagaggagtcttgcagatgctgagagggagggaggtgatccaggggaatagttattaataaaagtccagaggaaatttcaagggagagaatgcaaagatgagattatgaaaactggaatacgctaggaatggtggttcgcacctgtaatcccagcacttgggaggaatgcttgagtccaggagtttgagaccatcctgggcaacatggcgaaaccctgtctctaccaaaaatacaaaaattagccaggtgtggtggtgcatgcttgtaatcccagctacttgggaggctgaggtggtagaatcgcttgagccgggggaggtggaggttgcaatgagcgccactgcactccagcttgggtggcagagccagaccctgtctcaaaacaaacaaataaacaaaaagcaaaaactggggaaagaaagatcagctcagataggagtccataccacattattaaggattttggctttttttttttttttgagacagtttcattctgtcacccaggctggagtgcagcagtacaatctcggcttactgcaacctccgcctcccgggttcaagtggattctcctgcctcagcctcttgagtagctggaattacaggtgcgtgccaccaggcctagctaatttttgtatttttagtagagacgaggtttcaccatgctggccaagctggtctcaaactcctgacctcaagtgatccacccgccttggcctctcaaagtgctgagattacaggctggccaggctggtctcaaactcctgacctcaggtgatccacccaccttggccccccaaagtgctgggattacatgtgtgagccactgcgcccgacctagattttcgcttttatcttgaagattatagggagttccttgaataggtctgagctttggaaagatctccttggctaaggcgcatgacaaatggattgaaacagagcaaagctagaaccagtaaactctttaggagacagttacagtaattcagtcaagaaataaatcactgacctaaaatagtggcaaagggatggaaaaaagtagactctgcaggactggatgtatgggaaaggtaatgtcaaacacttcaagattgtcagcttgggcagcaaggtgtatagggctgctggtcactgagccagagaagactgggccaggagcaggtttgagtagggcattggcttaggaaagcactgagcatgtttaaatactaaggaactggtagaaaaggaaaacattttttcttaaaaatattacttaataattgctcttaaagaagaaaacccttaatttttagagatatatctgcattttaaatcatatttatattcctttcttcttcctctttccttcttccttcttccttcctttcttatcttctggtagagaagattaattttatgtggacctaagtgtgatttataaacttctgactgtaaagattaaacacatataaacatcagcatgagtgtatttactatagcttatcattatacagatgacagcaccaaagttcaaaatgacagctgatagtgtccatctagaatttatttctagcagcatgtagctaatagcaatggagcttagaggacataagaccacattaacataattttcgaagaatgaaataacagcattgactttctaatatatttatgactgtatttctggagtttttgattgcttataaagtgattttgttttccaaacaaaagtagggcaagattgaaaacttgaaaataattctcccattttccagagagaacaaatgatacatattcagggtatttatttcagtatgaataatatatgaaggatcataaataattctttataccttgaagtgtatagatacatttactctaaagagatcctgaaataaaacccaagtgaatgaagttggacaatgaaattcaagttctttttggagctctaagttttccgtctttgaaataaaatgaatttagtctatgtatcattccataattgtagtgcaactgttcttgactaaatgcacactcatcatgctgtttaaagtaatcataataccatattttacagtaactctctgatgtcggtgcaacacaactggaagagcctagttgattctgtgtttcaacacagtacaagaaaatcagttatcctcataataaatcaggtttaattggtaattctaaaataaatactcatatatgctctagttgaaccagcatcagatatttagtttgaacttaggtttgttattgactgatgaatgcctggctgctgcctggaagtgtattttcaatgtctatgtctcttgcttaatttcaaatgtcatatgtgtgtattttgtagggaaagtaggattttaaaatattttgaaatcaatagattaaaatatttgagtataggattacacagaactgagctctgtgttacagttgaagaaatcttttggtaatgacaaatgtatcaaaacatttaaatccatgtgttgaagcccaaaaaagtttatgaagggttgttatttctctagaacctctagggtgagtatacaaactgaacatataaatatatgtagcttaatgcctgtgaactttcaaaggaaaacactggccaaatgctaatagaaataagtagtaggaaaggataaatgaatatttattttctacccttagtcatgaatagttcactggatctttgtgaactttgaatttgcttaatagtaagacattatttggggaggttgattataaatgatcattagtacaatactcccatttttcttgtctagatgctcaagcagtgtgtctaactaccatggcatgtgagtcctctttgatagatagataggtctggacaaccatggcgtgcaacatatagaacctagccaggcagctttctctccagcctaccatgaacagtcacacctcttctaagattgttgttcctgtgggcaccaaactttgcccattaactgatctattctcatgctatgcatcatttattttaaaatcaccttaactgagtacttttcagattatctcgatcagctggttgccagatggaaacttactacaagtgtttataaattatactctggcttaggcttcaaaaaatagctattacagccagattataatgaagcccccatcttgcttttttattttaatcacttgaccctctcttcaaaaaagctgtggggaagcccctgctttagtagttcatcagtttggggggattctgtacacacatatttgtcttcaaaataagtaggagtgcacagtgactaaattgttttattcacattgcatttcaaaatccagtccgatgtgatagaacatagaattagtcaaatggccctttaggcttgctttggccaccctacacttctgtcctcatagtctctttaatgtcagtcagcgacatttattgagtgcccactttgtgttgggcattgcgtggagtagccttcggaaagctatgcaagctgttagcactgtttattaaagaatgttgtcctttatgtaccagaagtcaagaggcagcagtgtggaatgaaaataatagctggaaggaatgtaaaattaaattggttaattgatgtttgtgggcacatgaatagcttggcaatattcattttgattaatctgtgtaaagcataaacagtaaaagtcatttatattgacctcaattagaaaaattatgccacaagtccatatagggaatttagtgtagatccataagttatgcaacagtttccctgattgatcagttataaacagggccaatttgtaaaaatcatgatgtgtttaacttttagtcaaataaattgtattgaatgtacccaaacacggaagaaaatagcatgctgccttgcttattgcacagaatgttccaattttctttccacaggtcagtaattcccaaagacaggagaacttgtccttggattcatgtgactatgtcggcatcgagaattctgcatgcaatagggataaccaaagattaatttaattagataaacgcatttgagtgaaacaatcggtcttgaattatagctgccatgatcaaaaacaaggagaagggcagacagtaatcgaagcagatttctaaattcagcaaaggtaacatagatcttacatattaatgatgatctgaaaaatataaagtattgactaaatatcacgttaggatagtttttttgcacatgatagtttagtttaagagaaactctacatgacctttttaaatttgtgtgatgttcttgaataatccttggatcttggaggagagaaaaaaatttaattcaatgactctgagtgaaacattctgatttgccactttaaagactcatggcaatttttttttcagtctttttaatatgatagcactagccctttaagaataaattaatcggccgggcccagtggctcacacttgtaaccctagcactttgggaggccgaggcaggtgtatcacttgaggtcaggagttcaagaccagcctaaccaacatggtgaaaccctgtctctactaaaaacacaaaattagccaggcgtggtggtgcacgcctgcagtccttgctacttgggaggctgaggcaggagaatcacttgaacccaggaggcggaggttgcaatgagccaaggttgcgccattgcactccagcctgggcgacaagagtgaaactccgtttaaaaaaaaaaaagcataaattaatcgaaacatttgaaggaaaataaaactagcttacacagttgatttgcaaagacttgtcttacaaagtcctataaagctgtcctgcaaagccagtttgggagagtaagaatgtttccaggcgacagttagtttacaattgtgacatgtaaaagatgtggcagggtgtaagtgaggctaatactcagcaaaggtggaataagagtgaaatggtcctcaccttgaaaaagagctcctggatattaacaaagagtctgtcatatgccacagtggtgttttcatcctccctgtgagtctgtcagggaaacactactgagcaaagccagcccagagagtgagaaaccatgtgattcctatcctttttttccccatgcaaatggactaaataggtgatcaccttcaactatggccttgtgttaggtgtgtgttcaaatgttacatattctgtgtcatagaagtgaaaaacttcagagctggaagggatccaacaaccatcgaatctaattttcttttttaaaaaacaggaaaatagaagctcagatttgataaaggttacaaaagtccacacagagaaattcatagtgggatcaaaacctgggattagtaaatcctaactaagaggtcttctcaaaacttcacttcaggagttgtgatctatccctttaggttaaattatagaactgagacagttatttcttctccaaggtgttagtttcctgatggttctgtaatcatgatttcttatttaaaaggtgaaatttaaaactgcagtgaatgatttttagatttgctgtcatagggacttcagcagcaactttcagaagattaaagctgagaggctagcctttgttctcagtccttaatcgcttttctcttatgatggatttgaaacacagcaatacaaatgaaataataacagtaaaagggcctgggaatttaagaagatattgcaaatatgtcacgtcatggaggctttgaatttcactttctaagtcatgtatcaaattcaagtaccctgctctaagtgtggtcaaacatgcaaatatttgctttctgagtaatttgccctaatgactttgaagcatttttgaaaaacagtggtgacattgttctgccctggcagaaagcatattccttgtcagatgtccacagagatcccgactgtctactggcagattattaaaggatggtgctgcattgtatttgctaagctttccttcagtttgacaaaatgttatgtatataggttgtcacatcacccaagcttctgtgccagacctgtctggcagccacccttggttaaccactggaagatagaactagaaacgttttaacttctgaaataaggtcctcttctacagaccccttacacttttattttttattagaaagtatctgatcgtcggcaaagtttgaagtgatcacacataggcagctgctcataggaaattctgttttcacagctatgatgttttccaggttccaggttggtaatttaaatctgttcagccagaaaataggaaatttcagccatcacagtagcaccaggtgtttgcatttgtctttccttggcctgtccctgtttggacactaagctttagcagtggggttcagggatcactacatggcatatttgggacagtgctaatcataggagtatggatattatattcaccaagcagaaagtttctttattggagaaagcatgagatgatttccccgagatgaagaaaaagaaagaggggggtagaagaaaacaaataactagttatttagggaaagtgtattccaacagttgtcagcatgttacttggttggttcatactctcagtggttttttcgttcttaacaaagcactgtaatttcttttctaggaaaatttaccccaaatggtgttaacctttttttcaaaggccaaaagggaggtttattgaaaatctggaaaagaaattaaatatttgtcacacttaaatatgtttaaaattattaaatctgtttctgttaatctgcaaaaaaaaaagacgtttaggtcagtgtagtccagttaaatattgatattatgaattgcgtccctatctgtggttgtcttttattcatttacctcacaaacatgtaatactagtgtgcatatttaggtatgggaggacattggtcagagaaaacaggtatatcttgtaaagagcgagagctgatagtagtcacaaccttattcaaaaagatattaacacaaaataagggactaatatcacaggtgtaatgaagacttgcaagagaaaggaaagctttaaaattaaaggcatggcggtggaatgggtattgtattaatgagacagaaagatgccaggaaacaattcgagctgttaaagcacagcaaaattattcatctagcacctaggggcatctcctgaatctgctgtggttaaatattccttttccatgtgtaagtacagagtttcagacctcagctccagaatgaagtgaggaggctagagataatttttaaggtttacaaccagtgttttaagtggacataattctattttgaagattctattgaatgtttttaaaatagtacactaattccaaaagtgtgcgtgggggagtgcatctctttcaatagctggaaaaatcttggttggcattctttgttttgggtttatattctgaataaaatagttcatatatgttcaagaagaagcacgtattataagactttgtggaccacagaccttctccaagttctaagaaccttatagaaggagacaaaaaagttaaaaccacatcttagtaaaagaatttataagtacaccattaaacatcatagcctacttaaatactacagaacatggttcaaatatgtggaaaatttgatgagaaactaccatattatgatgaatcgttagtctatataaaattattcaggaaacatgaaaggctttgcttgatgtatcccagccaacagtctaatcttgtcactgattttgaagcatcatctttctgaatgctttcacttaaaactttaacatttaaaaggtttagatttcatgttccttttaacatgaatggagaaatgagcccccttccattgttgtcataatatttttggttcagtcagtaatttgtaaaacatgattttaagagatgccttcacctatagctgggaagttaaagtaatttcactgaatactggcaatgcctctcagaaactggattgtaaggataggaactttataataagcaagatacttgaggctcataaacgctggaatgaagagttattcaaaaccagattgacaaaaaagcagcgtggggccctgtggaaagcaacaatacaaaaatgtccctcttggatttgagtgtttagggatttgtgaactcaaatctgagaaaggtatttcaggaatgttatttttaatttttttaaaaaaaataatggcaaatggtttttagctttaaaaaaaaatgacatattggaaaggaaaattctagtctatcaaatgtaatatggttagtttctaaatatcttccacatcctgttttccccaaataattgcttccaattcaatactttttttagacatttaatatttaatttatagcatgtggatggataatataaaatctaagtctggaccctgcattgagtagtttaaaatgatttgcaaaataagctgtatgtacatgcaaataacaaatgaggaaggataggactaatattcaaataattatatataataatatttatattaatatattttatatggtttttaaactatatactacttaaactatataatatataaaaatttatatataaatatatagttataaatatatatatatatagttttagaggaaaccctaatggaggaataaagcttaatccatattagtccctcacaaagctttgatttgatcataattagcttcatacagcatatctaatgtatatttgctatgctcatctcagtgggaaacaatttctttcaaaaacctgtaatatgatttcaaagattggatggtgttgaaagccatcttgattattgtttgtaaagctggggaaaacattttcaaaatactaaaaattaaaacgaattataaatgaatcaacatgtttgctctcatgtggcacaatcatgaataatgacaaactacacaattataaaaaccaaaacttctataccagtgtcaggtgagccatttgatggatgtgtttccattgaatattacatgttaaaagaacggtaaaaggatggctaattgttttctgtaacaataatgagaaagagtatacataaaccaagtagtttccacttggtggaagcaattacaaaaataatttttatctgttttgctgataaagcagattcattaaaatatttagtattgtgtgaataagagacagagaagagggaaatagaaagattcaaaggcattcattgagtaatgcaaaaattctcatatgtagagacattttacccagcaggaacttaagtccatgtgtgaggcaggctgcttgcatggtgaaaaacaaaacaacaccgccccctcccctgctctctgtctgcctcacccccctcactccattgacatgcatagctggcctggtaggtgtaaaaatagactggcagcgcctgcactggaaatggtcactgaatgcagcctgcagttgccgggggttttgagttctctctgacaccagcaagccagctagcagatggggagaactggtgaggggcgtggaagggaactgagcagaggagccaaggatcatcttgatgaattgcccacattagtgtacccctgggagccctggacagagtgcagagggcaaggacgggcccactgacagcaggaactgtagagctgagatggggaatgcagccctctgctcttcttgccatgcggataagagcataagagcacaaggaaacatgcaggaactggataaaaccccagactactatggctgtaacagtgaggacgtcaaagaacctggagtgtgggtaagttttaggccacaaaggaggaggaagggaggatggtggcataagaatcaacagtagacctcattggtcagacctctaaacttcctggaaggaagctgacagaataaagccaatgtgatcaaaccacctgactacctctgatcaagtggcatgcttttgcttcctcttcatgttatgcaatgccacatgtttgttttttctcggttgtctttaactctgagctgacatttgggaaagagcaatgacactgtctctttaatttggaattttgtccaaaggtggacatacgtattattatagagtgactttcagcaatattgcagagattcacttacgttcagtctgtcaaattctttcgcctatttattcatgtatagttcgtttctcactaagtcacagagcatttttttaagcatatgctcccttagtatcccagctccagcctaaaacagtatttccctctaatatttgactaacttcagtgaagaggtccttaaatgcttttcttgttatgatagtaatagtttgtaaaaaggcttaaacgttaagcaattaaataagatttatttttttaaatctttattaaaattttattttttaaaaacttcagattttaataattcataggcatgatgtgttccttaaaatgggtacaaaggcttattgtgattttttttttttggccaggaatctctgaaatatttggattttcatatttgctggagaataaagtttatcttttatctgtcagatccaggaatttgaccaccttattgcaagttatttatttgcatgaaaataaatagctggttgcatggtttggctgcaactatgaaactaagatatgtaggatttctgagtaagagaggcagaggcgtttgtacttgttatgtacttgcctgatatttccaggagtgagaacagggtctgaagcataggaggtggtgctctgctctctttggcttttactctgacctgaaacaatgtcatcatttcttagcactgaaactctgtcagaccatagtgaaactaaaactaaaactaagaatttatcaacaaaaacaacatgaagggcaaatatttgcagttggcagtgaacagaaagccctgtcgtgaaaaagaggacagtagttccagcatggaggtcaccgtagtcaaaaacgaagaaaaaaaaaggtggggagggaggccgtcccagggaagggagatcacccaccgttaacaaccgcacaggcgaggtttgtaaccaagagcagtaacgtttctcctggattatggtttccactacccacatccacccaggagagccgctctggacttctcagagcagtcacttctaatgcagctttctgaactgaggggacaaaaagtatcattactactagttcaggaccacaaaaatgagtgtatttttaaaaatgtacaatgtcatttctctgaattaattaatatagcctgttagtcatttaataaaatcttctgctaaaggttttatagactggagcatatcatgattggtgtgacattggaaaggtgtggtagaggtggaagtggacctgttttctaccttcagaaatgatattctgcccagaatttttccactttggccatggagaaaaagaaaaagttaatgtttaacttaataccaagcatgacttaagcaaaatatgtggttctaggtagtttaagttggactttatgtcttccaaatgagaatgtaagactcacaaacatatgtcagggttttcctctgaaatgagcttggcttttacgtaaatccttaaaggaccaaagatctgctcttatcacaattggcttggcagctccaaaaaagaggaagcatgcaggacaggacagagtgaagaacaaaactcagctgtttttaaatttttatttagtcctggtaatgcttctaaatttttaatcacagaggggaaaactgcgtcatctcattatttttccatgttcatgtatgcagatgactggtgggtgtattccaagttcacttgtgaaagaagcagctcttggagatgccttacagactttgccctggatcctagggtagctctgacacaagtcagcaaggccttgttagggtccaagtaggctccagagagaaggattcttgaccatgttttgataaagtgctatttagaacagcataaaaaatgtatctttattttatggtcttcttttggcttgtatttttgtgatgatatcatttataaatttgcatattggtctaagtatactctgtatttttcttgcattgagatcatgtatttctattgtggtttccttagcataacaaattaatttgctttgtcccaagagcaaaaccatagatgcgatgctttaatatagacattttttaggttacctaccctagctgattttcaagttatcacatccttcttttttttaccagtttactctcagagatttttattttattgcttcatttatttttaacaatttttcccaattgtagtagagattttcaggtttttcgtatgagctttttcattattctataaatgttcttattactttagaccatgagcatgaattctggtcttattatgaaaacaatacttttctgctagctgactcaaaaggtaataagtcaatcagcaaatgttcactgagctaggtatagttttgaatgctggcgatttaacgatgacaagacagagttcctgtgatagcgggagacagactttcagcatttatatggggggatgaggaagcatggtgcctaactgagagggaaatgtactgggaacgttcaagggacggaaggatggttagcatgactgaaatgtagtgatcaaagaagaggacggatggcaatgaggtatgagaagcaagcatgggcctaccttggcaaaagtttgatttctttctgaacataattgagtcttggaaaaggacttgagatttcattagaagcacagtgggaagcctctggagagctctacaccaggaaatggtagaacttcatttatgctttgagaaaaatctctctccctttctccccatctcttcctccctccatttccccctccctttccttggtgaaggatgagttgtgaatgcagcaagagaaaaagaagggagaccagtttaactggtttcaaggtttgcagccctgaagtgaacaaggatggaggattggattaggatgttaacaatggaggtgagattgtaatcagattgaggatgtatttttgtttttattgaaagatttttgggagattataaaagaaatagaggggtgtgtgtgtgagagaatgagtgagatgattccttatctatgaagcatatcagtatgtcaaaagagttgagttaaactttccttcagttttgaactctaaaagaatataaattagtttaaatggtatagtattgtcttccgtaaaagttttataaaagataaggaaattttgttcatatggttagttttgatattaaccctaacaagagccaaaagtgtaatggaaattactctggtaaagcatttcaaaaaatacaaaatgatttagatatggttatgtaacttttagatgatttatttaaagataaaggcctggcatggtggctcgcatctgtaatcccatcactttgggaggccgaggcaggcagatcactggagcccaggagttcaaaataagtctgggcatcatggcaggaccctgtttctacaaaaaaatacaaaaattagctgggtgtggtggcacacgcccatggtcccagctactcaggaggctgaggtgggaggatcacctgagcctggggaggtggaggctgcagtgaactttgatcgtaccactgcactccagcttgcgtgagagtgagaccctgcctcaaaaaaaaaaaaaaaaaaaaaaaaaagaaagattgaaagaagagaagacatgactttcattctctaggaacttacaatccagttttagaaacagggcttacccacatgtaatcaattaactataaaaggtagtagagaattcactggctgcacgagtgttgaaatgagccattataggatgcccaagaaggaggggatcagtgcaggcctcggtgctctgggaacacctcgtggacagagctaatacttagctgatatggtgcagatcagctgtaccacttgtttacagtttgaattgctttcacacaggctaattaagcagctgttactatgaacctaccaagctgccccttctgaggctagcagaaccccatcctcaggatttcccagcctactcccatcctctaaagaagcaaacaaaagaataatgcttggactctcaaggggcttccaggaccaccctcctctagtgctgtggccagtgtccattgggagtggttggtgcctgagctgaactagttgttaaatatttttaatatccatcctgccagtggagaaggtggagcctgaagcagatcttgggagcaaaatacaatctgggttcctgttgggaagaaagtacacttgtgccttcagtaagcatgtattcagccaggcatgggcctaccaagatgagtaggacatgcaaacttggcttgaaggagtgtaatccagggatggccaaagcaggactttgaatattgtgttcccatgtcctgagaaagcacaggggattatagagtacttcaggatgacaactcagcctcagagggtggcagaaaagttaagtcctgaagcattatgggaagttcacacactcagtattggactcattagaaagactggaaagcaatggctataataccatttctactggacatttgtggaacccccaaaatttagatgaggcacataggctaagattatcaagagattcataagtcaagatttagaatttgaactatatactagtgaaaggccattgaccaaaggctgttttaggagaatcaattaggttgtagtctgcatatcataagctctattttctttgaagttcctaccagctaataggtacttagtaaatatttgtgaaaaaaatgaatgaattaatgactaggaaatcacccaaagtagcaaatctatttatgggaattttcccactacaggtgacatgcccccagatgaaaccagaggccgccaacattgaaaaggtgatggaagcaaaaaaacacttctaaaaacagtaaagacgttggtaactaagaagttttaattataaccttctgctcaaaaaaggaatgtacccttactgcaattgcacacattacttgttgtcgtagttcatttgtgtagctacaaaagaatacccgaagctgggtaatttataaagaaaagaggtttatttggatcacagttctgcaagctgtacaagaagcattgcaccagcatctgcttttggtgagggcttcaggaagcttccactcacggaggaaagggtaggagagctggtgtgtacagaaaccagggggaggtgccaggctcttgttaatgatcagccatcaggggaactctcataggaactaatacagcaaaaactcactccttatcaccagaatggcactaagccattcatgagggtccaccctcatgatctaaacaccttttattaggctctgcctccaatattggggatcacatttcaacttgaggtttgcagagtcaaatatggaaaccacagcattggtataaaatatatgtataaaacatatttactatagaaagtagtagacattttcttgaattgttattctctatatcaagttgtacataaaatgcaatggttacattttaaagaaatttggtgaaggtaggctgggcaccatggctcacacctgtaatctcagcactttgggaggctgaggtgggaggatcacttaagcccaggagttcaagaccccctgggaaacatagtgaaaccccatctctacaaaaaaaaaaaaaaaaattactaggtgtgctggcacacatctgtaattccagctactggggggctgaggtgggaggatcacttgagcctaggaggtggagattgcagtgagccaagattacaccactgcactccagcctgggtgacagagcaagtctctgtctcaaaaaaaaaaaaagaaaaaaaaaaaaaaagaaaaaagaaggaaagaaagattacattgtaatgttaagcattatctatttattttttttataatgaggtatatccaaaccaagtatttgtatttacttgaactatgtaataacttttgaataatatctcttctgctatatttaataagattagttccactgtccctatagtggctttttcaaggtcgcctgtgtgatgatggagctgggaatactctggggagagagtcctcttttcagctgtattttgcttccttcccacacagacatctgctgtgcctcttactcacttttagttgctgttttggattttatgcccctttaatcaaaacttattatgccacaagatagattgacttgtttcctgaattctttatttttatttaagggtttctctgtgaaatcttaggcatattatatcacatttgattgtcaaaattttacgtgtttgatttttcaaagctgaccttcatatcatatttgtgtgggcttatgtgactatagtaaaacttttttgtgcctttctttaatacttccttataagaagtatacgtgtaattccagcaatttgggaggctgaggcaggaggatcacttgtgcccaggagtttgagatcaacctgggcaacacagggagattctgtctctatattaatttttttttaagtttgatggtgtgcacctgtggacccagctatttgggaggctgagctgggaggaactcttcaggccaggaaattgagggtacagtgagccttgattgtaccactgcactccagcctaggtgacagggcaagatgctgtctcaaaaaaaaatagtaaaaatcttacaatgattgacagaagtataataatttcaatggtggctttgagctaatgaattgtttcttaaagctatgtgaaagccagctgtgtaatagtagagattataaattgaaactgtgtttttgatgagtttaagtgttgctgacatacagtttatttaaatttcagtctttttttttttctgtactctttaccttcctcagtcatcaatgagttccaaaagggggctttgaagtaaatcatagattctgtttgatactgtaggaatttccatattctagtacagcaactctattaaataaacacattgtgtacttaaattggatctctcacaagtcacaaataatatattagaactagagctgaagtacctttatatttgctacttttgtgtcatacctttctagattattggctttctgaaggatattagaaagcatcttctaagatacctagtaaaacagaagtacatagaaaaatttgtgaaaatctttcctttttgaaaaccactggttgttacatatgaacttttccccagagttacaaaagaaaaagagtatttttcaggaataaaagacatttaacaattttatattagtaaggtatatatttcacagatttgtctataccatctataatacataatcatttcttttaaaaaatggcttatgatattcagctttttatgcattcttacagcatacattttgacagactagatgattaatgatgacataggataaactgtatttgggattgtgtaataaacacacagtatgaaaagtctagttaatcctttatgtcagcgcctcccaaagtgtactctgtgaactaccacatcagaagaatcgcctggtgtgtttttaaatgatgtagatggctgagctttactccagacctcctgagttaaaatctcagaggtgagagccaagaatatttatttaacaagattaagcatagtctctaagtaacccttaagtgcacttaagtatgataaccactgctttgtgttgcaagaggctgactttactgaagagtcagggctgaatatgtaacatcagcacataagagcataaaagtagaagaaacccttcacattttattaagcttcttcttatccaggttaattcaatgtattgccaaaattctatttagaggcaattaaagtagctgagaccacatgggacatgtgggaatggaggatactctgccagcaaatgggcccttctgcatttcatatgcatcaccttaaaagtaagaaaatatctgtgctgtatcaccataaagttttaaaccataacacttagaataaatttaagtttcacttccaaaaactaataattactgtgtacctatatagagtccttttattcattgtttaaccttgtcaatttccactggaaatccaaggagtaaggtactataagacaatgttatgaaaatgtgtccccaaatttttgaaaagtcaaaatttcattccattgttgagcagtcagcttgaacagcaagattgttctgaatgatctgatccttccttggaattgagggctagtacaatatcttggctgaatcccacactcctgcttaaaatgtcacatagcacatgagagatgattaacaaaattcttctggcctcactaaaagttcttaatatatcgactaatgtgaagtgtatcaaatattagatactctctatattttaaaattatatataaatctgtagaattaattattcagtaagtttctttcaagaaagtaaataatgaattctgtaagtctacatgttctttattcttgttttgtaacatatacatagattgaagaatcagtctttcctttggtattgatttgtcgtacccaccaatcaattctttaaagaattaagcagtgatctagatggacatgccaactgccattcttattttaaatgtaacccaggcagttacagctacatgccaaaacctacccatagacactgtcaactaatggactgggctgcttcctggcccatcttggtcttaaccacttcatctggcattgggaccagatctattctacccaggatcacaagataacttagaggtggaaaacaagaaggaaataaaaagtaaagacagtaaacacataaaagaaatgtatgaatgtgtatagcaaattccatattaattatcatcaataatagctatcatttattgagcccctattatctgctagattctgtaatggcatactgcataccatttcatttactactgacattagctttgtgaaccgagtattaacatatgcctttattggatgcctactattccaatacactgttctcaggggtttatatatatgacataatccaatccacatattctatacattttatatactaggaaattgaggcttttttgagttcaggtatttcctcaaggtcacacagctcatggcaagtgatagaaccaggattagaaaggcagttctaagtccattttataatgctggctctttaaagaaagagatacctaaaaaaggagacattggagaaatttaaagtgggttctaagattttccacaattggaagaaattactgacttggaaaatttcaaataagattgttacttatgacccacactaaaatacgttttaggaaattaaaaaaattaaatggaagaaaaaagaaacaatttttaattaataaatctataagaaaatgagaaatatttcattgacttcagggttggaaagcataaaagcaatggaataagaatctaaaagtggaacttcatactttttgatttctataacaagcttgagaaaattttcaaaaacaatgacaaaatgttatccttctatataatattaaaaaatacttttgaaactctaaaaggacaaaaagtgtgaatagacaaatcaaagaacaaatgtggtagacaataaatatatgactaagttttcaaactcttcaaaaacgaaaaaggcaaatgaaaaccacaatgatctacttatcgactaagcaaagcaatttgagtttatgattgtgttgaggtggtctctttggcaaacatttgtaatgtcttttcagttagcaactttcaatgcctacagtgtgtgccaaaaatctacattctttgacactgttaattcacttttaggaatttaaacaatggacacaatcaagacagggacaaagatgtacatacaagagtttttatggcagtgttgcttaaaataatgaatattaaaggcaccagttctgtacaaatgtttgggaaatgctaaaaacaatgataatctatccatagactattatatgatatataaaatacctttttaaacttttgtgtggtataggctatactaactttgtaatgtttatttttaaaagtaaaacagaatattattatttcaacatcatgaaagcattacctacacaaacgtatagagtatatgtagaaaaattcttttttttttgtttttgagacagagtttcactcccatagcccaggctggagtgcagtgacgtgatcacgactcactgcaacctccgcctcccgggctcaagtgattctcgtgcctcagcctcccaagtagctgggactacaggtgcacgccaccacatctggataattttctgtatatttagtagagatagggtttcaccatgttgccctagaactcctgagctcaaatgatctgtcttccttgacctcccaaagtgctgggattacaggcatgagccacaacacccagccttaatgtagaaaaattcttgaagaaaacacatcaaaatatgcagtgttaagtttgactaatgggattatggttgctaaccgtaattttgttttcttttatagtcattttcaaatgtcctatatatatatatatattatatatataaaatgtatgtgtgtgcgtgcacactttcacagtagaacatgaaatcatcatatataaaaatatatgtgtgtgtgacacacaaacagatttgtctacttccattacataaaggctagggaaggctatattttacatatatatcctttttaagagaagggagattgtaagagcaaaaaaggcatgaaagggcatagacattttgtagttttatacaaatacttttatgaaataagtatttctatgtttcttaaggttttataacctaaaggttttttttttaataatccatgctttaatagctcttcaatcaatttgggagagaaaacttattatgggtttcatttctactacttagtttttactgtgaaaagatttagtgttatagtttcttaaaggtgtaatcaacatttaaacagcaagtatggtgattaattaagaacagctgagagaggtttcatctatcttggaaggggtccaggtttaaatcccactcagggagatatgtcaatatgagctagtaacagtctacgtgctgttatagaaacagagggacaaatgttgtctttgaagcctaccattgctgtgaagcttaaaaaaatttttttctttgcatgttaatcatgataattttgatagagatattgctctggattcacttactgagtataatattgacacactcttgaaataatataaccatacccttaaaagtcacagctcttgggttagcaacattaaagaaaagaaatcttggtattccacaggtggcaatgccacatggttcaaactttgggccctgcccctaaccaaaaaagggaattgagcatcaagggagatcagaacatgagagttgagccaggaatgtgactgcagtagcttcatcccaggcaggaagcagcagccactcctatatgtcggtcaacagtggaaaggtatttagcacctttgggggaacttggggaagtagtaatgaatggtggtctctatggtaggacttaccagttatcaatttcgggtctgccacttcttaccccaaagtatacagatgaatcatttaaccttatgagaccttggttttctcatttgggaagcttaagaagattaaataagattataaatgtgcttggaatatagtaaagttagctattaatattgtggtaaaaggtgtgagaacaaaatatgtaaggtgcaaggtctcattcattccctcaaggagctgacagtctagttgaatagccagagggtatacacaaaagcaaattgtatattgtagagtctcttgagtagacagatgacttaaaagaaaaagcaagtttagatggcatgtagcatcctaatttgatgttatgtcagtccatgttgtgtaggaaaaaattcaaacatttcagtgaggaatcactgaaactgaataaatacatatgaatcatgtaaaaatgaagaattgccttgcttgctcaatgcaccttttagcaagtgtttatcttaagacatagtgaacatcagtataaacccaatcaaaacacatatgagtaattctcttacttgaaaccatgatcagaagagatggcttttggtcagaccaaatctttgtcatgactacattattagtacaaagttaatagttatatctatgaaaaagatgttatcagtggaggaaactcaattactaatatatcctatgattatcatatgtgaaaaaaaaataaaccaaatcaaagtggagcatctccagctgaaggcaactctatcttggtggaatgccacagggttttaaggtagacccaggttctcaccacgctgcacattatatgctgggctcccattttgaaggttgccaatgagaaatggcacaacctaaacaccttttatttgaaattcttaacatctcgtagtttcacagtcttgccctttaattactgagacaagggtagcctgctaccctgttcttagtcagggttagagatgaggtatctatggtgttaatttggcatttcaactaagttaaatttggttaatgaacaagatctttctgggtacagtttactgctttgccaaaaaaagttctgttatcttttcatatatcccacaataatctaactcttctttaagtgatttttgaagtttattttttgagtaattaaagctagcgtaatttgtatttatattaactgttgtcagctttacataaaaaaaggtaaggtaatatcctccccagggttctgttatcatagtaatcatcattattggctgatatattttaggcactgaattaggttttgggtattctaagaattataaggcatggtttccaccttcaagtaaattgaaattttgttctggaagtagcatatatgacttcctctctctctctttctctttccttccacacacacacacacacacacacacacacacacacacactagtttatattatattacaggtagatatttgtgtaaaaatgtatatgtaaaatgaaatatatagactccctatgactgaagagagatacattttatatacatagtaattataaagaaaacaaactttctccttcgtatcttggccagaataattttgacataccaatgatctcttttatttagaaggttaattaatcttactgtaattacaggggatactgaaatatattactgcatgttttacattaaaaaatactgagtagtcagtaattgccctttcatggataatttatacaataattaaagcttatatattgcttcacataaaatctttttcctcacagagaagagtaaaattatagtttcttatttctttattttttttttctttttgttgagatggagtctcgctctgtcacccaggctggagtgcagtggcacgatctcggctcactgtaaactttgcctcccgggttcaagtgatctcttgcttcagcctactgagtagctgggattataggcacccaccaccacgcccggctaatttttatatatatatatgtatttttgtagtagagatggggtttcactatgttggccaggctggtctcaaactcctgacctcaggtgatctgcctgcctcggcctcctaaagtgctggaatttcagacgtgagccactgcacctggcctatagtttatttctaaaaaaagagtactagtgttcctatgtagttaatatcagcaagaatctagtttctttctgtatttaatttatttagtaatgtcataattgtcatttatctgttaacctaattaaagttagagaatgtcgagctgcagagcctgtctagtcaagtgtattactaaattcattagtcatccatgacttcagctgtatgatagtaatgatacagacacactttactcattaacccttagaaagagttcagcattgtttgattttattgtggatatttgatagaattataaaggaaacttaaaaaaattaataaatagagacagggtctcactatgttgtcaaggctggtctcaaactcctggagctcaagtgatcctcttgcttcagcctctcaaagtgctaggattacaggcatgagtcaccacatccagcgggtaaaggaaactttgaaaaacaaatgtaatcttaggcaatgagtttcaggtgaattaataagagcagatataaattttgctaatcaaggtttgaaaccaagtgttaaaatttagtaagtctgcaaaaaatttacttgatcccccaaattttcactagtttaattcatatcgaccaatgctgcttgacattcctattggccaatttcaccctgttgaacatcttcccttatattgtttttcccttatattatatttccagaaatacttctccatctattctgtgtcaggtactgtgctggacagtggaaataaaaatgaataagtcatggactatttctaccttggagggccaggccaactggggatatagacacgtaaacagatgaatttggaccccacttgagccatgcacaacatctagcacagtgctatgcttctgactcattgtcaacacatatttataaacgattgaatgttcagggtgttggggaccccggaataaatggacttggtcaaacttgagggtagatttaaggcagggttctgaagaagctatccttgcctctgggaaatagactcacagggcccacttaatacaaattcctgtagaagtcaaataataaaagacaactagtaaagaattcttcattgttccttaagcctggcttaagtctgacttttcttttaaaagaagatcttgggcatctgggctaaagtttagttccatgagatgaattagctaaccttgcttttgtttttagttgtgtttaaatcaggaatttccttacttttcaaaattcgctctagagttgatgccagtactcttacaccaacaaatcaagaatttgttttgaaagctgcctcagaagacgttcagatattctttgaaatacagtaataactacgtggatttttgttgacagagttccaacagaagaattttgcaatataagctaagttttttttaaaaggcagtgcaagctacaaatacttgatttgctcatcttttttctactccatgtggtatgtactataattaatcaaacacctacattttcagccaatgctatcttttacattttagtgtaaaattatgtaagtgctataccttgcatagaattcaaattgaatagcccaaacattcctgacaattacagttcatagcacaatggtaaatttagaaagttacagcaggtcacatccaatgaggataaagtggcctctcagttgtgccctggtcttatgggaaaaataagaaaatgtcagctgcatgatattagtattctgagctcatgagaaaactcctgtacaaaattttgttttagtctcgtgtgtgtgtgtgtgtgtgtgtgtgtgtgtgtgtgtgtgcatgtgcatgtatgcgctgcaattccttattttattctcactgcctggtatttcattaaatatgttgatgggtcagcattattcccttccaggggcattacaagaggcccttccttattcctaggacattcatgagcagagaaatgggaaggagtgaagcgaaatccagtgtctacagaaaaactgggccatctcccagaggtcactctatggcctctatctttagtccatgcccgtctcttggactttttagccttgcatttttaattccctactctacagtgacagcacttcaagttcaatccggtcaaaaccaaactgtgttcttctctccaattttagggtattctgttcccctaaattattgatctttattgaaagtgtcacttattacacgcaaaagctagaagtctccaacttttccctagtttctccttttccataaactttcagagtcaatttcccccaagttttacagcttttttttttctatatatgactaatactttgttttcacatgtccctgatgacactgcttatcctcatcacatgctagagtggtaattttaaaatggacattctgatcttgccttttcctgtcttttacttatggtgtaacactcaatctccctattaggacatacaaaacattaatggtctgggccctactttacttttagagttttacttctttcctgtttccaatatgatctttataactccttatactgaatttatagttttctctatactgtgttctttcgtgcccctatgacattgcacttgctattccctgggctggctctgttttccacctgacttatcagcaggaacctttatcaaacactatattgcaatctctattctaaatgtaaatagtaaaacaagtttgtaaaacaaacaaacaaacacctattgcttagactactgcctctacatggatctccctgggtctacttttcccacttctgttcctggtctatcttgtagctaaaggttttttttttttttttttttaaacttcaaagattataaaatctttgaggggatgaatcatgtttatttcttctacattcaatccctagcatctaacacagcgcctggtacatagtaggtacttcaaaaatatttctttgattctcatctcagctaaataactcattgttaaggacagattaaattatttcaactatttatcataaaataacctgctgtttgactgatttattttcgcttgagaaattgaaagctataatttttttccagtaggtttacatatttagatagatacagctagatccttccagtaatttaatcaagtcaactcagtgagttaaactgggaagcaattttcttcttatacagtacacatattacatattctttagtctcttaaaaaattttatgttaaaaagatttgttgacactgttgtgcaccagtgggctggcatgatgggagtgagaaaagggatgcaaaatgcctttatatatatctttcagtataatgtcgacttattagaattggaatttttccttctaaagctcaccatttgcactcagtgtccatgtaaattgtcacaaatatgcaaaagatgctgaaagctgtgcatccccatttgcgacccacatactttggagaatggggtgaatgaataagttctcaaaaattatatacacattagaaaaatgggcttttgtcatcttacagatgacaatggactttttttttaaattaaaaaccaagctttggccgggcacggtggctcactcctgtaatcacagcactttgggaggccgaggcgggtggatcatctgaggtcaggagttcgagaccagcctgaccaacatggagaaaccccatctctactaaaaatacaaaattagcctggcatggtggtgcatgcctgtaatcccagctactccacaggctgaggcaggagaatcgcttgaacctgggaggcggaggttgcagggagctgagattgtgctattgcactccagcctgggcaacaagagtgaaacttcgtctcaaaaaaaaaaaaaaaaaaaaaaaaaaaagaaaacccagctttatggagatatattcccatatcatacaattcacccatttatagtatattatccaatggtttttagtatgttcacagagttgtgcgaccaacaccacaataaatttcagaacatctttatcactcaagaaaggaactttgtaaccatcaatagtcattctccatttctctaccccctcccccttgtcctccccatggcatcctttggccccaggcaatcacttaccagtttttcatctctgtatgtttgtctattctggacatttcttttatatcaacaataagcttaaataacagtttaataaaagggactaggctgggtgcggtggctcacacctgtaatcccagcactttgggaggccaaggcgggagatatttaggcaagtagagtcagatggtcacagtgtggttaagctataattaagtgatatctcctaggaaaatcaatcacatatgtatatatattagactgttacaaatgaaaaaccagtgtttccacgtgcatcttcatggggccacactaagatcaacagtgtgagaaaatgtaccatgatagaaaaatatatgcaagttcttttaaaatagtctccgtagtttaagtaattgtgaagttttaagaatctattttttgttcaatcctgaataatttaatactaaacaagcaatctactttttagtgtgtgcagcccttggggtgcggtcagcacctcatctgtgttgtgtcacgaagctgcttctgattgagtgatgtctgcttcagagcagatggtctctgaagctgcagaataaggagaccaatggggataaaaatgtggtgcctacctcaagggggcaagagtaaattaacactataagatgcggatgcgtagcataatgaaaaattgatgaaaggtttttttcacttggttgggtttgtttttcatatcctgacagttctaaaagccttgaaggaggctaagacctaattcaggttcatgtatcctaatccttaagtattgcagtgggatgagctctaatatatctttttctctaaacatcctgtaatattttaacatgctgattagggaatgaaaagagttttgtatagagaatatttcttaaagaaagaattaaataaactactgttaccaaaggatctcaaaagttctctcttttttctctcgacccaaatgttgttataggtggttgtaattcatttataaaagcaactttttttttgatgaccagtgatgatccaaaaggaaattcctttggatatttgtgtacaatatgtaaaaactctgtcagcttttccatgcttgggcctatattcattttggggcatgttgacttttagatgctggcagaacattttttacagagctatctagctagttgaaaattgggaaagagattgggtctgtgatacaaattgttttaaaaataagtttttcattattttatacccaattaataccagttggagatcctaaagcaataattgagaactatttagaattcagtcatatatagatgctgtgggtattattaaatatccaatgtggagctgtaagatttgattatttctattgctggcctgaagaagtacagatttccatgttactttggttattaaaaatattagggcaaattatctggaaaccataatagtcaacataggacttgtataatgttttgatttcctttacattgtcagcattttgaacataaaacagtaagcagaacttttcaaatatatctgttcaaacagtatggttagaggttgtatgtggaattcaactatgatgttttaagatacctccacaccaagaggaaccagtaacaaaaatgagggaatcatattcttctagttcttatgttattctctagaagtatgatagactctttgggaaggaatattaacttttgctacagagtttaatggctaaagaaactaaggtgcttacctgactgaagcagtaatgtcttaaatctgtgtagctgaggcctctcaaagagtatcttatttcttgaaaaaatctgaagccttagataggtgtggtaagttttaacatggacctcaaactgttatttaatctgacatctgacctaaagctgtagcaaaatgtttccctgttactctgattttcttagcagaaatttggaaatgttgtgatacaagtcacaaatattttcatctataaacttaccatgttcctattcaaattcagaaaatactgacgtgttcagtgttggaacttctgagttctgtaggcatttcagagttatcatgcctggagtacaagtaatcaaaacctattgattttgttccttacgagaactttaaattttaaattcaccataaagttcaataggaaactaacagaataataaacacctaagaaagttttcacctatctttgttaaagttcccattttagtgaaagattttgttgcctcattgtcattaacattttagtaactggcatagttatagagacattttatgaagccaaactaatatcaacacaacaaagttatcttttaagtcacacttctattatgtcatgaaataccaaatacagatttcacatttcttcagtttaataattcttcaaaaatgagcgtatatttacactcatataagtgtgtatgtatatatgtatatatatatatgcatacatacataagcactttctaaagttttaaaagcacatagagaatgtgaagtatgaaatagttatcaaatagttatcaaagatatttcatcagaaatatcttttctagtttgtggtttttgttcctactagtttttgtttttttggtttttttctttttggtagtaattctcattcactggaggatagcatcacattattaatattttgattcaattttcagaaaagtaaatgccataaaaaaatgagtattcagaactttttaatgtataaaattgtctctgataacttacttcacttatatttatcccggaaaatttaacaactgagatctctgaaccagatctggtcttcttgaatttgtagtaaacatgttgaagaacaggggagtaatgctatttatacaatatataccaaggataataattcatgtataatcaaagagaattatgcaatttttgtaattacaaagcctcatgaatatcagaacaactaataaaaaattatccagagtttgattcttagtaagcattcttttgagctaaagaacaaaactctatgtatttagtaatctgcattgtctcttagactgtaccataaatatacaatacaaatttcattaaaaatatcacataatatagtctgcatttaaaaattgcctccagtgtgaaaaaaagataatgcttttgaatactaatttttaaacctatttacttctctgtgatttttgtaatcagtttataaattaggaataacttatttttcaggactactcacatttagctaatttttaaattttttataaagatgggttctcactctgttgcctaaactagggtcaccttttttttttttttggaaacagagtttcgctcttgttgcccaggctggagtgcagtggtgatcttggctcactgcaacctctgcctcccggatccgagcgattcccctgcctcagcctcccaagtagttgggattacaggtgtctgccaccgtgactggctaattttgtgtttttagtagaaatggggtttcaccatgttggtcaggctggtctcaaactcctgatctcaagcaatccaccctcctcagcctccccaaagtgcggggattacaggtgtgagccactgcgcccggccaggtcaccatcttttaaagtaaatattttatttaattatagcacacatacagaaaaatgcataaattataaatgctcatcttgatatgtaggaagtgtacatacctgttaaactgcacccagaactagaatgtagaattagaacattatcagcaaccaaaagcccctttctgattgtttccgaaactactactgatttctaacactatggatttgttttgccagtttttgaactttaataaatggaataaaagacatgtccttttttgtgtctgacttgttttgcttagcattatctttgtgagatctattgatggtgcatatagatatggttcattcattcctattcccactgctgtaaaatattccaattttactctcttttaaaatacaagaattttagaaaggaattcatgaatcttgacacaaccttgcaaaataatcttaattaatgctttgaaagagatagaattggtatgctgtaggtggttcttatttttcatggttggtatcttagggaaagcgttgataagtgatataatttagctagtgtgctagcaaaaattagtgttaaaatgtaatactaagttaaaggaaaaattgctgtctttatttaaaaaggaaatttcaaataatctctcacttaaaatatttaggtagaatttatctgtttagttaaacttagatattgttatgattccaattctcaattttgtgtgaatagttatcttaaataacattcaaaagtaaaaatataaacacttaagtttactctttcttcttcccctaactaaagcatttatagagttcacttttatgtctgaaccaattttcttaacacaaaggccattggattaagaacactcttttgagaagttgcatttactctctctgaagattaggggacctgtcagtaattttcatttagtagcaatctaaagagctgttgaaggacaccatatatgtaggttaacctgcatgtttgagccagagtgtacaaatttatggtttataaattggtagcagctgaatagaaattgtcaagtgggattttgcagtgtaaagtgttttatatcacttatgtgttctgactgcaagaaagtaacttctgcaattctttctaaaaaatcctagtatatccagcatgcagttcttggctgaacccaaattgttggtttcgacaagacagcaataataatgtgagctaatgaaagagctgaattaattaaacaatagagcagtccttggacagaagtataaatctgtaggtacaagcattcagatatcacaaagagagttctctgcagcatcttcatcactggtgacagaccacacccagttctggttcattttgtccttttatacctgtacatctcagtgtatttttaagtactctggtgtagcttaggcctgctggcaacacagtaacgccaggaatcttcacatttaaaaaaagtcatgtgtgtgcatcgataatttgatttattattgttattttgcatttatccctcacaagaaaagccactaatataaaacaaactcagtaagtgtcctctgtgcctgtcagtggggtaagcatgctcaaatcatcatattttttccttagcaattctataaagtacatttatttttttgataaggaaattgagacatacaatgacccaagatcggacaagtcacaatttgctagacatggattttaacttatcctacatgcctaggaagagacctaaaaaattgtaaaaatgtcccttattttcctggtattcttattaaagtttttcccttcaagttactttactaggttttatttattttgtattgctataaaaacgcagatctcagagtagccaggtaaatgaccctgtttttacaaaggaatgactgcttcctaagaaaataagcagattcctcaaattccacaaggagcctgtgctttacgtaaggttagccagtcagcaaatatgtgtgtagggcgcaccataagccagagactgtgacgggggaggtgttcagtgtcactcttttaaggctagtagggactgctggttgggtcaccgttttagacaagtggttctcaaacttgaatagtctattgatttcttttaaagtatataaaaaattatgacctccagtgttatttttattatagtgttaagtattaaaaacataaagccacataaaacttcttaaattcttgtgccactataaaaaagaaactttgacaaattaagtaaaacttatgtaagttttataatattattcaaataaagggcataaatttaatacaatgaatggaaatgtctgaaactaaatttaacatattgtgcttagtaataaaaaaagaaataacctcagagttctgtatttagtttctgaatttgactccagtaaaaataatataaagaataccttttttgtaagtatgttgtacaaactattcttaataactttaaggtgttgtttcctacttcaagctaataaaacttatagctatcagagaatagctttaagagaatataatctttgaaagctctctttatttgcttggagaggaaattactattgggatagaattgtgtacgcaaaccaataaaagctaaaattgaaaactgaaaaaatgtttcactgtggattttctattacactcactgctaatggtcagtgcacgttggactatatgaagatagcatctgagcatatgttaatatgctactgactgctgctgctcaggcacttttggctcgtcatgtcctgccatgtatgatgaacagattctctgaccattcttgtctctgtactacagcaaaatgttctgtctattatgcatctgtatatcatttggacttcacttgttatgtactgagttataaacacaaagacatataccgaagttatatgtttatactcacatatagggtagccatgtagaggacctggaatatgctaatattttctttattaggttattattgaaacgtaagcacagaattaaagaattaaaaaacttgtagcaagctcatgggcccctgtggacatgcccctagagcctttgggtcagcactccttggggatataatgtggctctatgaatgcacattcctccctgcctttcatgtccacactgctgggtgctaagaaagttgttctgtgtttctaatattcagatacaagacaacatacagaactgtgtcaagaataatttaatgggaaatttttctttcttggcctgagatgtcactccagggttataaagggggcaagttttaatgacatccatctgttgcagattaaaataggtggggctcagcattggaattccttgtccagagtttgactatgggcatcagcacaatttgttttaggatttgagagtcctagggacataaagcagcaaagcagggagaggatagtcttacatttgtctgagactttcttccaaagaagttgcttttgcctcattttctctttattttgcttttatgtgtgaaatctcctggttgagcaaagaaaacagtctattttaaaagcatgcttttcctcctacttatacttgattttagaactcttgcttttatcataatcagttgggaaacacagcatggtaaaaattgctgtatctctctccctgaatgtttgaatcctctttcatctctgtgttgattgaagataaccaggctaaccactgtttatccaaagcgcttgtgtcaagggccttaatcacagattgacctcattgtagggtacgatgtgcttgtgtctatgtggaagggagagaagaatatgtatttctatgcaggtatataaatttgggcttcaataatgtcaatattcatacataacttttaaaacctcattttatttctgtctttggaatttacattcttggaccattttatgataatatttccatttaatgcattttctcactttgggggaaaccaaatcccttaaaggggttctagaagaattcaacttacccaaaagtctcctatgactcaactgctgaagtggtctttggcagaatggctcagatattacatttccataggacccagacccttcagaacactgggagcattgtttgctaaaattctaaggatttgctataactttgacatgcattcactttttaaaagtttgatgaaaagagaaaaccagttatgaaaactttttgttactctataacggcaaaagcaatcctcaatgtcatgtccaatccccagagaagattcaaagatggtctattatatactcctcagcaatacctgaggccccatcagaccatcattgccactccaggctgctgcattggtgtttctaggtgtctcttcattcctttggtgtcaggctcttcttctggctccacctgttcacagcattcttttttataggaacaatagagcaacctgatcttttgctgagtttaatcatgttaagcatgtagagggagacagacaattggcttcttaatgcaaagcatcctttatcacctgtttcctcattctcacatgaatgtgtttctaagtagttcatctcagattggctcttaattttctaggtgcatatagaggggtgatagttgtgagggtagggatggcagtcaagaattttctctccagctgaggcactttatttagcaagtgccatgatttacagagtaaatatgtagaccaaaggcataactggggttaatgcaggtgaaataaacctagagctcacaggctaggaatctgtagtaatattcactgtgatactttgaaggtgtgggataggatagcagataaaacttacagctctgaactgataaacataaattaaatctcaggtcttccactaaataaatgtgtgtaaatacgtgactctggaaactttctaaatctctttcctcatctattaaatgggcataagaatagtttttttctcatagtattgttgtatttgtgatataatacatgtgactccttgagctctgttcctgacccactaaaccctcagtaaatgttacctataagcatctgctttatgtacaaattggaagtactttctaggaacaacctctaatataatatatagcacacagatttgttttggaaaaactttatatacaggaataatatgttcgtattttatatctgtaacctaatactatttaatttttgttgttttatagtaaaattaatgtttcttgtgagatattaatataacataatacacagtattataactcacttttaagtgctgtgacaacaaacctgaaggtaggaaatcctcttggaatttagcatatgctgcaaacagcaaaataaatttcatagaataggcatttaaaaacgagtcacagttcagtcgctgcagcattgcagatattcttgggggcactctgccattggtacagacttcaggaaggatgaagagtgaagaacagtgtgatattaatcatatgatgatggatttctaaagaatcagggcatgaattctggatgtatagatttcagtcacacctttcaactcttaataaataatctatctcatttataaacatataagccacttggtatttgggttaaaagtgaggtaacttagttctatggttttcagtctttccatgtgtaaatcattttaacagtatgcaagtaattccatatttgaaactcccagagaagatacttccatttctatctctgtacatcaccacagatcataataaatagctctgaccgagtatgccaagaggttcttgccaagtactttgtttgagggagggaggcagtgtagcctagtgaggagaatgtttgattaagagtcatcaaaccttcatctcaattcctaataggtaaattgtgtcccttttcatgcctccattttctctttagtcagatattatatgacaaaaaattataacagttatgcaggtgtcttggaacccaacaaaagtttatcatcgttattatgttaaggtttaaaagtcagactttataaccaagccagggggccgtgtgattgtaactgtgcatctggagcaactctcttcggacttttcacgggcagaattcagctgagtctcccagcatctgattttgagaggagtgtgggaagatgagaaacttaaaaagcagtttccatccagagtgatcatctttaccaaaagattttagtctggtattatgtcaggtggtttaaatttaatcatgtttatccagaatcactgggatcacaaaatttgcatcagcccagtccacacctgcgaagtagtgctatcccctttcctcaaagcaccctcggagctttctgttattcccttctaatgagaccagatgactgccaagtgacccatactcagtgttctctctcagaagcatctgaaaaccaacaggaaagaaagagaaagaaaaaaacccagtagctttaatttctttagctttctgattcttttttgacttgaggttagctcagtataaagtcactagaatcttgaagctaaaatgaatgagtaatagcagtacttgaggctagcatcaacacgtcttcaattgtggctgaagatttagaataaagcagtaacaattatttccattttaatggttcttttatactctaaaatattgacttttaatgtacttagacaactctctagaaatattgtgaagttgctaccttatatagtgaatgattattcaatgttttaaactccgtattattgaaatttttccaactaaagcttttctgacttcagtgtaaacattcttgtctttctgtattggatacatttctatttcatcaatagttcattaaaggtcttttatttttctcgcagtctgacagcaatgcaagcttcctccgtgctgccagagcaggcaacctggacaaagttgtggaatatctgaaggggggcatagacatcaatacctgcaatcaggtaagaacatggcagctagctctgtgttgtgcaacgaaggaacactcattacattctcagagcccaagattatttttgtctttattaaaaatactaaaatatcagtgactcagacttctgaaatcccattttttgcccccttaccaacttttcaagtatcagatgtttgtatctagagctaatgttgctgaaaaagcagatagatcaaaaacaacaactgaatgtcaattttgtttgtgaaatgatttgggccacctttagctggaattttgaccaagaatgatgttttacttctcatttatcatctagtaatccagatcttggcttctttccttcttgactatatgcactttactcatgggaaactgattattacaatttagtatacagaaataagaggataaaatgttctcctaattaattttaaaatatggctcataatgagaataatttgaaattattattgtaaatgatgtatccattcatcatgtccatttcataaggactttagagaatattatacactttggatattatttggtaccaacgttgacatttttgtgctatttttgagtaagatttttacatcatgaattaaagtgtctagtggactgcagtattcacttcaatgctaaatgttgtgttgtgtgttgtgtgtatgtgtttgacagagacctaactaggaagtgaataattctggctaattttaagttaaaaggaggtaaatgtcactactggattctaaattatatataaattcctttttctatatcctggtatatattgaacccagttatgtttactttatagaccactgaaattaataaatctttcaaaaacaacttttcagaaactgagcccggtatcttatcctcaaacttattgtactccctaattcctacctgctgatttcctcaccaatgtgccattccaacccaactgtttcccgttcctcatctttccccctctccagcccagcactcctctctttgttcaccttctgcatccagattacatgagctcggatcaccttgtggtacttaacagagttgtcataacagccttcttactaggttctgtcttcaatcttgtccactttgatcaattctccacataatgccttgagcgataaataaaataaaaataagattacaacacttccttcctccccaaacttctatggctaccctatatggctaccaattcccagatcagtgaggtggttgtttcaaaatcacctgcaggcttttgcaaagggtacaggatttccctccttcttcttcagagtcactggcataaagagcattgtcactgatgtcaatatttctcatattttaggggagtgtgtctcttaccgtgaaaacatgttgagagctacttaatgttgggaaaggcattctgctgtggccctgagcagtcctgcagatacttttgggaataacaagaatgaaagactttgggattgctttttatctgggctatttctcagggtggtgctcgcagtgagcaaccttgagggattaggcgatatctccctctagctacaaagcaggcctgtatgaatcccccaaggtcagtgttcttctttaacacaacccacatgtatgggcatccatcattggtcctttgtgtcaaccctgttagatatgggggaagaaagggatagggaactggtataagcagcaggctgacacttggctactgcttttgctctgaattacaacgtcctttgtttctcacccagaagacttgtgtcttctactagcattatgaaacagtaatggtttagtttttaactctttggtaagataaaatctcaagaactttacatagttcttaacactgacctatggaataaacccaaattactgtattccaatatgtaaaatcttcgtatgttgtgtctacattcctccatcttatttttcattatgaatcattttatctgatttttttttgtgttcttttggacaaataatttgaactttagatacattagttaccttaagaaagaaagaacattcaaactcccatatggatatatggacttattctataaaatacttatgaagttgaatatgaaatatttatttatttatttttattttattttattttattttttattatactttaagttctagggttcatgtgcacaacatgcaggtttgttacatatgcatacatgcgccatgttggtgtgctgcacccattaactcgtcaattacattaggtgtatctcctaacgctatccctcgctcctccccccaccccacaacaggccctgggtgtgtgatattccctttcctgtgtccaagtgttctcattgttcaattcccagttatgagtgagaacatgcggtgtttggttttttgtccttgagatagtttgctgagactgatggtttccagcttcatccgtgtccctacaaaggacatgaactcatccttttttatggctgcatagtattccatggtgtatatgtgccacattttcttaatccagtctatcattgatggacatttgggttggttccaagtctttgctattgtgaatagtgcagaatatggaatatttaatacttttcacgtaaacttaggtttccaggctggagtgcggtggcgtgatctcggctcactgcaggcttcgtcccctggggttcacgccattctcctgcctcagcctcccgagtagctgggactacaggcgcccgccaccacgcccggctaattttttgtatttttagtagagacggggtttcaccatgttagccaggatggtctcgatctcctgacctcgtgatcagcccgcctcggcctcccaaagtgctgggattacaggcgtgagccaccgcgcccggccaaacttaggtttctttaagtagattaaatgcactccctaaatgtcaatttgttaactttctaaatttacaatatgctagagaatagacaatgaaaccgttagttcatttaggtaaacttatcataaataacaccaaaaaagagaacctaaggaaaagaaagttcatttcaaaccaagtctacttcacactgaagtataacaaatacattaattgtatgaaaggtcttagggttattttgagaaagaataatctctcaacagtaaatactcaattcttatcatatttatagaccatcttagcttcttgagttagctttttcttatagtggccagccatccactaacatgtcactataaaaggaaagaacatttatttctgtgagaaggcaacatgatctcatgaagcccacacaaaatttagagcccacaggttcaaattcaagtttcatctctactttgaagaagtcagctcactttagaaagtgatatttttctaacttgtaaaacaggataaaaacaatacattcaatgcttatacccctgggttgcaatttaagttaaattatgaaatgtaaaaggagtttctaaggtacatgtgttctaattacaattactgtatataattcaccaagaattatacaaattaaaattgacttacactcaaaatatgaggttgattctcttcaattccctgactcgccaggtataaagtaaatgcaaggccaggtgtggtggctcacacctgtaatcctagcactttgggattacagtgggaggctgaggcaggaggattgcttgagcccaggagttccaggctgcagttagctatgatcgtgccactgtgcttcagcctgagtgggtgacagagtaagaccctgtctcttaaaaaaataaataaataaaacaggccaggcgcagtggctcacacctgtaatcccagcactttgggaggccaggaggtgggtggattgcctgagatcaggagttcgagaccagtctggtcaacatggtgaaaccccgtctctactaaagatacaaaaaaattagccgggcgtggcagcaggcgcctgtaattccagctacttgggaggctgaggtgggggaattgcttgaactagggaagtggaggttgcagtgagccaagattgcgccactgcactctagcctgcgcgatagagtgagactccatctcaaaaaaaaaaaaaaaaaattccccaaagtaaatgcagtctcatgctggttctgtatttttattaatactattcaagacagtatattaattaaataaagattagggaaatacagtgactaatgttacctgcttagctactgtgtattagactttgtgctggggctttacatgtgatgtcttatcagtcaactgagatgaaatattgtgagacagggattagttcaagtttacaaatgtagaaactgggcccacagtggttaagtgacattcccagggccacatggatctgtctgtgtcccaagtccaagcttttttctgctgcaggatatctttttgagtagctatttggagctgcccttcaaagtaatacagtggtgatgtcctttatcttaaagctcaaaacttatttttaatctactactgctaatataaaaataactttattcataggtggttacaggatcttttaagtcaaagagcaccaccaccaggatttctactaaaactcaaatacaatatagaacaggaaatgatttctaaatacccaggaaagtaaaagagacaactattcagccaaactattgctatttctaagtatacaatattcaaagataatatggcatatgaaagaagaaaagaaaatgtatcctctagtttgctgctaagcctgagtttctagggagcattacaatatgtaatgtagaaaccaggactttctgtactctgttgcatttctcaatgaaaggcaatctgagctgcaccagctttccaaaaatatcacatgtgttggcgtgctaagattccttaaactgaaatttgaatcaatgttttttctttataaaattggtttcacaactaccatgagaagtttaaaatgtaattcccaaatactattttgcttttaattatttaaatgatatggggaaaattcataaatttggcacatgaaaatactctaaaagaatgtcaagttttcatttttcttttttaaatgattactaatatggttaacttttattttctttaaaagattacaccagtcatctttttaccgtattatctcttgtacatttagaagagaaaataaatcttagcgttcaatttatttctgaaactcataaagacttactttcttacctattccctatttagtaattctgcataacttaatactgttacaaacaagattaacattcggacattaaaaataaactgtatagtattttaataaaagtttgtagccagttacaagtcaataaaaaccccagtagtttcagaaagtttcatcatgtatacaatttattagtttcactatagtgacttcaaaatgaaagactatcacttagcatttatttaatacaatcctggatatgataccagtgattaacaggtcttaaaatgccctgaattttggccttggccttttaccattggagtttaaaggtgcaaaattatcagttaaatcctgtgtttccttttttataaacagaaggcaaggtcgaagcaccattttcaaaacaatattaatgttcctcaaatagcagacctttagcaacaagaagatacactcagcaatgactttagcatatgctcacacagtatgactcagaccatgaagcatatttggaagtcacattaacaatgtggatgctggaaaccaaattctagttttccccacttaccagctgagtgaccctcggcagtcagcttctgcaggcctgagttttctcaactggagtgagcataacaacactgaagttttagggttgttttgatgattaagtgaaatgtttgcaaaatgcttggcagagcaagtactcaataaatacttgtgaaaatgatgcttattataataatgtaatttttttatattgattctcaacctaagctttagcaaaagtagcactgattcgcacaagcaggacagaacataaaaggtattgccatagcctgtatcaccaaatagaaaaaaattatgattagtagcaatttggtaaagttactatttatctgggttgcattaaactgaaatatttatctggaactaaaatctttttcacaaatgccatttgggttcatctggtttagacttctctttaaaaatactaaaaacaattctattagcctgggaccttataaaaacaacaaaaatgaataggggagaattaaattcatggaattaatggaacatggaatgagctatatgcagttttctaaccagttaaattaggcacaaatatatatgcaaaaatataactatatagctaaatgcttattattgacccctcatttagaagaagcaaaaggtgatgtttccatctggttctggttatgtggttttggattctgtgccatcctgtaatctctttcgatgcatcagtgctggtccttgctctatactgggtagtgctgattcaggttagaattgagtaacacctgtctaatattttgagtacttagaaattttagtttacttgttgatatttgctcaatgtaaagtaaatccagtagagagttttcatcaactacttgcccccagctctaaaaacttcattctgtttacaattaggcaggtttatgaagatttcgaaatgtgactcttctttcattttaaaaatgctgggagtagcttcatgcaaattatttctatgactgtcttattaagtactctccgcagtggtttagatcggaacagaacactttataatctggaaattctcttgaacactctctttctatggctaagcgacatggattttaatatctgactccaagcagccactccactcttcctagctcatcttagatagtagaatcgcagcatttttttctgccggtctgaactcaggcacgctatttgttcatctacttactcaaacatgtattgtgtgtttactcagtggcaggctctgtcctaggtgctggggatggagcagtgcagagagacaaaaactctgctctcataaagctcacaatctacaacctgagagaagaaaaggcagtaagtgatatggaggaaaatacagcaggggagaaggagagaggggtggaatgggagcggtgtgtcactttagaggggatggacagaagaaaacctaaagaaattgagcaaggaggccgtgcatgctgtggagggagcacactttagaagaaggcttgacaggtgagagaaccgcacagaaggagcatgctggcatgttcaagggccagcaaggaagcaagcctgcctggagtagaatgagggaggggaagcgtaggaggaggttggggagagcagaaagcagcattgggtcatgtaaggccttgtgggctattttaaggactttggctttaattccgaatgagcagagaagtgattagagggtttttagtggaagagtgacatacgctgacgagtcttaatagtaaggctcaggctgaaagggaacaagggcagaagcagggaacacttttgtgatactttaggtgagaagtgaggtgttttacagtagagcaacaggcaggagaattggtgagacgtggctggattctagacacatttcaaaaatacagctgattttgttgatggagttaatgtaggatgaaggcaaaagaggaattaggcatgagggttgaggtcacaatggaaagaatgagagctgaagttttattaactgagatggggaagactgtgtgaggagcaggtttgagggaatactcagcaggtcagttttgaacatgttaagtttgatttgtttgtgtgatatccaagatattcagtaggcagttggatatatgaattttctagggtccagaaaaaagattttggcctgaagtgtacattttggcatacccagtgtatagatagtattcaaaaccgtgttactgcatgaggtcaccaaaagagagagagtttatgaaaaatagaataggttcaggggcttggccctggagtactacaatatttagaggtcaggaagatgagaagccatcaaggagaatgggaaagagtgtccagggatgtaggaggaaaacctgaagttgtgatttcttagaagccaagtgaaaacattattttcagatggatgaaatgataaactctgtaaaatgctgttgatccaataagctgaggaactgaacaacagccttagtaatgtgatggaaactggtgacttgatcatagcaattttggtggagtggaggggtaaaagctggactggagctcattcaatggatgacgggcagaccaaggactgcttcaagggctctttctataaaagaaagaagagaataagaaaagtagctggaagaggaagtggaatcaagaaggctttctttgtaataggaaagaaataatagctttgttttgttgatggaaaaatatcaacagggaaggaaaaataaataatttgagagagagatgggagaattactggatggtgtccttgagttgatgagaagtggggatggagcttggtgcacaagtggagggactggcttttgctagaatcgtggatagttcaggaaaaggaaagatgtatgggcagaggagcaggaagtggtgtgggtgccgtgctgggagctggttgtggggtggaagttctaattgcttctgtttttttcagcgaaatatgattctaggttatcagctgagagtaaagataggagaggaggggatggaggtggaggagggagaaggtgtgaaataataatccaggagagtgggagagatagcagttgagggtaagacagtatgattggcaggcagcatgaagggtctgcttgagcatcatgatcaggaatttaaagtgagtggaggtggcatgtgtgtgtgttcttctgcagctacattcagacatgggatcacatggagagttatatatagccaggaatgtggtttagctaaacacatatggcagaactagagaaacacaagggaactgaggatgcatataaggtaatgaataaaataacgataaagactatgcataggattcatgccaagtgaggagataagtgggcaccgtgaaaagatgaataggctctaactattaaggattgaaggatttctggagttggatgagtagattagcaagagagtaagtgctgttcagagggttggatgcttaaaattgaaatactagaggaagtttataattattggaaaggaaaatgtctagaatgtgaccatggaagtgagcggataaggtagagaaaagaaggaatcattgaggaattcaagaacctgaacacctggagttttggaagagtcacctgtgtatatgtaggagaaagtggcagtgagctagaagctaaaatcttcaagggacaaggaatggcatcaagaggatacaggctgatgacatcaggaggtttaaaaagaggaggaagaaaaatagtttaaaagagtttaaaagagtggtgagaagcaagaagcaaaatagagctcccccaagttcggtgattaataggaatacgagatccaaagacactgcttccctgaagtctactcaagtgaagtatgcatcacttgagtagacttcagggaagcagtgtctttggattctagttagagcaagaagcttaaaagggatatttagagaacagatttagcccagagtatttgctaatgactacacccatgcattctaaaggatcagtgtgggagttttgggaaatgggaagtgataggagacagaatcagaaaaggaggtatacagaagtggagagggataagatttgcagggatgatggtggagttggtgactatcataaacagggatagaggacatgataagtttagcccagacagtcccaagcagatagcaattgtgactttgtggaaactatctggagaaagaagtggagggaatctctccaggagtctgtagagttcaggagtcccatcttgatttttgctgttggagacaaagagaggaaagatcttaatgcaaatatgcactcactgcaattcttccagtatgcactacaaacacaggtggtgtgtgagatgaggtgaagctgccattcctgcctagtcatttttctcctggttattttctttgtgcctttaagaatcttccagcccttttgcagtagctgagattttgccaactgatgttctcatattctgttttatggctgatcattaattcttttattattattattattatactttaagttctgtgatacatgtgcagaacgtgcaggtttgttatataggtatacacttgccatggtggtttgctgcacccatcaacccatcatctacattaggtatttctcctaatgctgtccctcccctagcctcccactccccaacaggccccggtgtgtgatgtttccctccgtgtgcccatgtattctcattgttcagctcccacttatgagtgagatgcagtgtttggttgtctgttcctgtgttaatttgctgggaatgatggtttccagcttcgtccatgtccctgcaaaggacatgaactcatccttttttatggctgcatagtattccatggtgtatatgtgccacattttctttatcccgtctatcattgataggcatttgggttggttccaagtctttgctattgtgaatagtgctgcaatgaacacacatgtgcatgtgtctttatagtagaatgatttataatcctttgggtgtatacccagtaatgggattgctgggtcaaatggtttggttctagatctggttctagatccttgaggaattgccactctgtcttccacaatggttgagctaatttacactcccaccaatactgtaaaagtgctcctatttctccaaatcctctccagcatctgttgtttcctgactttttagtgatagccattctaactggtgtgagatggtatctcattgtggttttgatttgcatttctttaatgaccagtgataataagctttttttcatatgtttgttggccacataaatgtcttcttttgagaagtgtctgttcatatcctttgcccactttttgatggcattgtttttttcttgtaaatttgtttaagtttcttgtagattctggatattatccttttgtcagatgaacagattgcaaattatttccccattctgtaggttgcctatttactctgatgaaagtttctttcactgtgcagaagctctttagtttaattagatcccatttgtcaattttggctgttgttggcattgcttttagtgttttagtcatgaagtctttgtccatgcctatgtcctgaatggtattgcctaggttttcttctagggttcttatggttttaggtcttacatttaaatttttaatccatcttgagttgatttttgataaggtgtaaggaaggggttcagtttcagttttctgcatatggctagccagttttccccacaccatgtattaaatagggaaggcacagcttgagcagacttaaacgttcctgcctgccagctctgaagagagcagtggatctcccagcacagcactcgagctctgctaagggacagactgcctcctcaagtgggtccctgactcccatgcctcttgactgggagacaccttacagcaggagctgacagacacctcatacaggagagctctggctggcatctggcaggtgcccctctgggatgaaacttccagaggaaggaacaggcaggaatctttgctgttctgcagcctctgctggtgatacccaggcaaacgatctggagtagacctccagcaaattccagcagacctgcagcagaggggcctgactgttagaaggaaaactaacaaacagaaaggaatagcatcaacatcaacaaaaaggacgtccacacaaaaaccccatttgaaggtcagcaacatcaaagaccaaaggtaggtaaatacacgaagatgaagaaaaaccagggcaaaaaggctgaaaaaaagattctaaacagttttttcttccctctgtagaagtttcccagtactttcccacccatccctccctcccctcctggatatcttcccgtgtctctctctctctctctctctctctcttctctctctctctctctctccctcactcactctctatctctgtattgatgattgtaaagaagtaaacaaatcctatgatctctagtcttttcaaggcctcttctcttatggaatacatagaagaaaagaaaaaggaaaccttattttaaaatggcaacttcttcaaattgggaattctcttcttagaaaaaaaggaatttgtgtagaagagaattcgtcagaattaagcagtggttgtcagattgatgtgggcatgatcagagcaactgtctgtgaatgaagctgcatatgtgcaagtgtagagcctcatgtggcagttgtttttagtccccatactcagttcattttttacctttttcctcagaaatgaaaggtcttcagggtaggataaaagagaccaagatgcagatgagcaagagcccataaaggcacaccttggggcataaggacacttccccattccacaccccaccccaccccctaaactgtcattacttaaaaaaaaaaaagaaagctctttatgcaggctggagtgggcagaggggacagtttgaaataaatctctgcacctcagtgggtatgcagtcattgctgcagtcagtgaaggctgttactgcccttgggaaaaagagaatttgcaatgtgatatttcctttgaggaataaaggaagacagcaacagtgcctatgggagttagaggagggaagcaggcagagaaaaccatttatcagaaagttgagaatatagtttctcatccaaagtaacctcagaagtttttcaagagatttgttgttcaagttcccttggaattataagtctcgatgccaaactaatggtcactttggccctttttaacaactctacttttagtgaaatttttgcatcttaaaaaagacactagtttcttattaaccaattgtgtccccagctagcagttttgcaatatgcagacaggaaagcaagtcccgcaaactgggaacttggaactttagcaacacaggaaatttgaggggtttacaaagaaaagctcacagagtatacaaatataaacagggttaaaattaaacttaccagggagagacactatcactgacttacatgaacctatttcaaagaatgatttataaactagaatttaagcttcagtgtcatataacgacaggagcacagtgttggaaagaacaagacccaggattgacacataatagatatccaattaatatttgataaatgaatgattgagtggatattgggccagccacttaaatcattctgaatctcaaattatccattcatgaagtgggaaataataatacctgttatatcaaataatagtttattgcatgcctattacatcctcatcactgtgctacagtgtatgtgttacatagtgtgtgtgcgtatatacatatgtacatatgtataatcttcacaacatacttctctactttaaaaggagacgattgggtcctcagatgatacatatgaaaatcaattgtgttgtgcacactcatttaggaaaccaaattatggctctgatggttatatttacatagaatttggttagcaaagttaggctagccacaaatgattatttcacccacatcagagtagatggacggacaaattctggacaagtactaacaagtatattccttttgattttggctatgaagtttctaattaattgttataatttcttttagataatttatagtcctatgggacacaggaaagcttctaatacttaggaaggttctagtcatgcctccttaagcatccactctgctttctagatggaaagatccacatattattaggttctatttacaaaccaactcttaagacaacatttcttctacttatagggggaaacttcttttggtcccctaagaaaatacatctgtgtgcctcagtttgagaaaacctgcatcaaaatttgaatgttccctttaagtgattccttgaaataaacacaatcagaagcatgatcaagaacaaaaaattactaaatgttaattaaatatgattatccagatgacccagaatatgcttctattaatgtgtttcagattggcactaaaataaacatgtaaaatttaaaaattgtcatagaactctgagatccttaataacaaaggctatttaaattaagtccttccttcagaatctagtttccccttgtatgtgttaatggtaaccaatttgggcctcagagagtgaatgtctcctgattttgtttccaaagatggatatatttatacctgacttgttcatgcactgacttgcatttgctgacaaaatgtagagtacctgggtgaattaagcaaactcctatttaccttcatactgtacacattattaattagcccatttattgtacaaacattattgaagtgcaccttttttgtgccaggtactatattaggtgtagaggttaccagtattaataaaatttgaccatttctcatgaaaaagaagccttgttgggaagataaacaggaaacacacaaatacaataaattggttaaaagaaccaaattttatgattgctcagaggagaaagtgactaagccagcttgtgtgtctcagacatacctgaaattgataccaaacaccatttataggaattattttataatgatggaaaacagagtaccagggtgttatttagaagactcttcaaagcttttattgtctaatgctccctcctctctcttcccacagagtccagcatgccaaatttggcttatttttaattaaaattataaaaaatgtggagaagatcggaagtcattgtaatgctctaataatattaccaaacttttatattgataccttgaaatatagacttggtttctagcacaatgtttagcaaacaataaatagtcaacaaatgttttagtatgtgaatacttgaatttagttactatttattgaatttaagctatccctagtctattaatttgaaaactctgtatcatgttttatccgagtttagtattttgttcaaaaatatttctttacttgtgcctcattagaagcaggaggatagggcacacactggaatctgctgtggaatttctttagttctagcctccctttttgcttcctttccttcgaggtcctgccacctctttcttctcaattccgatgtcaccgttggtgcctggaggcatctccacttctggctgtctcactagagaattctcttgtttcatggtacatactccttcccctgcttgccaaccttgataaattctatgtcagtaggagaaagttcaggtttttaatgccctcttttaagatgggttcattgaaatgttaaatgagtcagtgataaacatgcagaactaagacctagtcttttggattgtatctttaaaaacttctagaaattatactcttattacttgtcatctgatcttagaaacacagaattttgttattacttgtcatctgatcttagaaacacagaattttgttactgtaaaaaaaaacttaagggagaaaccattctaaaccctttgctccatttttacttagcatttacttttatttatttatttatctatttatttacttattttgaggcaaggggtttgctctgtcacccaggctggagtgcagcctcagcttcccaagtagctgagattacaggtgcacaccactgagtcaggctaattttttagttttcattttttgtagagacagggctctctatgttgccaaggctggtcttgaactgctgggctcaagcaatcctcccgcctcggcctcccaaagtgctcggattataagcgtgagccactgtgcctgcctagaattcacttttaaatgctgagcttggcatgcatttgacaccataacattctacaattcattttaatgtttttttttttctaattttgatgtatttggacattaaatatctacaaacctaaaagaaataatttttagagactgagatattttctattaaaaaatagagctaatgagaagttgaggtctaaagaaaataaaataggattatgatgcagaggccattggtttttgtgttacggaggccagggaggtgaaaaggggaggaggtttaaaagtgcagtttctgagccagaatcaccaggtagttgataactcagaatgttcagttcaggattatatgaattaatgcaattaagcacttagaacagaacctgacacagaagaataaactctgatacattttagctattatttaaatgatttgccactcacttttaaatttaatttttacattcctttaaaccatgactattataataagtagttcagataatttttcttctttgagccttatagaaatgttttcttcttatacatgttaagccaactactaaagaaataatttacctatgtaatcttataaaaattaatttaaccaaagaaatgagagaccacatgaaaatggcatttacataggagagttgaggctgggtatggtggttcacgcctataatcccagcactttgggaggccgaggtgggaggatcacctgaggtcaggagtttgagaccatcctggccaacagggtgaaaccccgtctctactaaaaataccaaaaaaattagccaggtgtggtggcatgtgcctgtaataccaactactcgggagacggaggcaggagaatcgcttgaacctgggaggcggaggttgcacgatgagttgagattgcaccactgcattccaacctggacaacaagagcaaaattccatctcaaaaaattaaatgaataaataaataaatagagttgaaatgttcagtagtaaaattgcaactctttaaattattgacaagggtgactactaataaaccaagctccttttacccatctacttcctaggttttattgtaattcaaaatacttaaaaaaatacatcacttttgcatacgttaatacttttgctagcctacgtaaacgtatgttgaactcaaaaatgctcaattcatctcatcacatttagccaaatcttagtgatggaacattggcagggctgtggatggggagagcaggaatatatacatgtattactgtttgcatgtaactgggaaataataataccttacatttgttttttacttcacaaattacaaacagaattaacctacattgtttgatactcttaaataactatctgaggtaggcaaagtaggacatttcccttttttactattgaagaaaccttaaatcctattgtttaggactggagagacagcacgggagctcagatttccttttgccctgtgcccgtgttcttcactctgccaccgtccctctcagaaccccaaatgtggacacgatttagccaatattctcaaaatgaagaattctgcttcatcccattgtcagtccttttatttgcatcacaacacccatctaaaatgaaaattaagttcagaaaactcaaataagtctaccaacaaaaccatttcttttcttttttaaaaaattttactttaagttctgggatacatgtgctgaatgtgccggtttgttacgtaggtatacgtgtgctatggtggtttgccgcatctatcaacctgtcatccaggtccaacaaaaccatttctaaatgtccattatcctcccttaaagtgatttttgtgagtgccaatgttttatttatttgatctaaaaggacatctaacttccccaagatgacctcctgtctcaggtcttgactaaacttcttttttgcaatccagagcatgcctgcatgtgcacacacacacagacgtgtgtataaaaagtttcaccaaaacccctcaaaatcaacagagtccacccacagtgcactctgtctttctttatgctacttcatgatttgaaccatgctgattagcagtccattagattgaatttatgacccgtttatgcatcgtgacctacagtctgaaatactggtttagcatttaattattttaaataaaaaagcatgggtctggaaatcagatagatctgagtttggattttttgctcttcctcttataagtggtagtgatctttgaggcaaatcacttgacttctgagaattttagtgtcatcatctgtaaagcataataaaatatgctgtaatataatatatgtaaaatgtaaaatataatagtgattcctatgtcattaacatttcttattctttcattcatcaaatatttatttctcagcactcataacctcttcatttttcttgattttagtaagattccgaagaccaatttttacagttttttcttctcccaggcaaatgcactaccatattcagtgtcattctctatattttagggattgcattatttaaaaaaaaaaaaaaaaacaacccttgatggggctagacagggagaaaagatcagtggccaaaaagggagctaccatccggggcgctagacgggactccgctatggatgaagtggagatcctggtgtggactatatagagtgacatcttcaaagtattcttattctagccctttttcactatgaaataatcgataacctgaacagccaaattccagatctcattgtaaatatttttaagttaatgaaggcttagtaaataccacattaaattatcatttgggaatttaaaagaaacccttgaagatctgagaataactaataaaacagatatactcttggatcacctatagtttgatttactttgttaaatcagaaacctgtggagaccagccaaggacacagtcagttcagttaaatgtgtctgacaaagatggcgcattgtgtgctttgcttttcctgatcttcataaaaaactaaatccttaatcccaccgcagtgaataagtacccttggtttagagaagccgctgtggaagagaagggaaaagtgcagataaaagatatatgggcgtaaggactgagaagggatagagaacatgtaaatgtgtcattttcatttttaattggattttttcttcattgtatagattatttcttttgccaatgtcatttatattaatggcacagtgaaactgcagtaatatttcacatctatttgtatctacatttatggcacgtatttcatcttgagaagagttcttggcttgggggaatcttgacactgaagtccattcagagtggtggtgaggactgagaggacaagttgcactttccttcacaattactgcctttggatgtgcccattttctctctatctctttcttctaacctctttcaaaaactttcaagaactcatatattttaattgccttctccaaaatatttacattttcatacaattaaagatgttatataagttagttgtacttttctgatatgcaaaagacagactgtgaaactcttcattcaacatgtgccgtatgcaaagcagggcagacagagatctgaaaattaaatcattgacaatatatgctactgtgtagttgattttcagttgtttaataataagtatttgggggccaaatatttatcgggacaaaaattacataatgtgtcctttacttctcccttagaacctagcactgagagctgagcacttagtgggtacctagcaaatgcttatggattaacaaataaatttgtattaattatgaatttataataaggtgaaaaacagtttgatggatgatgatgcaaacatttaaccttcatgtaagtttagccatatcttcttgaatctgttcctcaacttttccaaatggactcctctgtggtttttctgtatatgtcagaaacactcaaatggttccatgaaaatttttattggctatctgttctacctggggtcatccactagctttatatgatcacagaaaggcagtcaatggggaaagtatttcataaaatcagcaagagaagtagtgaacagagcttattataaatctgattatgaacaaaatgttaaaatattgctttataaaatttgatagaagtgctgaacaaaaaagataactttgttttttaggattgattaatgtgcacatggttgtttcagtgtagcattaccatctttttttaaaatctacctgatatttttagccattttaatggtattatatagaaatagcattattctgaagttgtggtatcaaagatgatatcatgtctggaactcacagatctgcaaagcccaatatcttgctcacaataagagctcaataaatatttgctgattgtttcaaaaaactaagtacatattattttatcaaaattaacttacataaagtcagtatcaatgacttatcaatagtatcctgctttagttgtttcccatttggtatgcagtatatataaaattgagagatatttaaatcattgctagaaatataacctgacacagtgaaactataacctgacacagtgaaactgatagatatgtagaacattgctggcagtgaatctataccttgatgcagcttccccaaattataatgttaaaattattccctcataaatttacatttcagtagaagactgttagatagcacatctctgaactataaatctgatcatattacatatcattgtcatgtcttttgcctctaaatttggagaccctatcaagaatatcaagattgtctttgttctctgactctagcatcataataagatcattttattgactgatttcaattcggtggtcaggaattaacaatgaaatattattattattactattaaatgtcacagtgtaagaaggacagtttctataaccttcatatttagtacaactttttctttttttacattctgagtatgactcacagtcattcttagataagtactcttctataacaatctacataatgtaaataatttctatattccatttcaaaatccaaaaacatttatgattagcttctgagattatttatgaaataacattttgtagcattacttgggtctatatgatatgtgtaaaacagtgtatttcaatttgcatgtgaaaaatgttaaattattcagtatcaatattagaataccgtctgtataagacaagtgggctatggaagctaataattggcaccatgtaccagctgctaaactgtcactttatttccattgctctgtttaagccttactactgtgtcagttgaagactttaatccttgttttgaagatgaagaaactaatatttattctatttttcaggttgaattaatattttcctcttgaaaatttgttcttgatttttaaaatcatattaattttcttctaagttttttccaaattgttggtcagtattttgagtcactgagtagctagttggagtgagttagttataatattaatcaaggtataactgttgtctgtaaatcccaggaggtggggagtacatcttcgtaagtgtgaaaagcgcttagcagagtgctgctttgagatacaaaaggactgaaaaaatataaagctgtacatgtcccagaaagtgtacagaattttattttgtgccagtacaataaatggtataaaattgttctctttaagtcatttaaaaaatttagagatttcttcgtttaaaaaaactgttgaaatgaagttgccaaaatccatgtttctaatgaatacttaccttattgcctctctgaatcaaaaacactgaaattagtctctcttaaattaatagattcaagattctaatgcaaaaaggaaaaaaaagaagagatcagagtctgtctgttctctgggttatatgcttgagtaggatcagggcactattttcctcattacttcacttcttaaagccttgtttgtttcttctctcagaatggactcaacgctctccatctggctgccaaggaaggccacgtggggctggtgcaggagctgctgggaagagggtcctctgtggattctgccactaaggtaacatttatgttggtagaacatttttttccttagaaaagcgaaaataatttaaagcttttcatttttatttattttttagacaaggtctctttctgttgcccaggaagtagtgcagtggtacaatcacggctcaccgaaacctccacctcctgggctcaagtgaccctcccaactcagctgcctgagtagctgagactacaggcgtgcgccaccatgcccagctaattaaaaaaaatttttttagtataaatgaggtcttgctatgttgccttcctgggctctagcgatcctcctgcctcagcctcccaaagtgctgggattataggcgtgaaccaccacacctcacccacttaaagcttcttttccctctcgtacatttcagaggttggctagaacaccaagattcttaacctgcagaattaaaattaaaaccccctccattaaactctgcagagtgaattgtttcatttaaggacttatgggacatcagtctgaaaaatctgtaaacctagtttataaaattttatctttcccccttcgattcacagaggatgagattaacataatcctttgtagacaatagcacctgttttcctacggttaactcattgtttaaaaataaacccatgtgggaaacttctctatggaaaagaacaagtaattttaaatgtatacattcagtttggtatgagactatgcagaatcgtttatactctaataagaaaagagattttgggtcatggattgaattgttagggcaatattagattttatcatcataatgtgtttggtaaggaaattggactcattttaaaagaaatgcacgggacgcttggcaaaccagaaactgttccttgatgctgcttttgctaaaacatatttgaacttgtcgaggattcatttcataaacaacagacatttaaaaaactattatgaatggcaacaatctttgcctttggaaggtaaaattttatttggaaaaatacagtgctaatcagagccaagtctgctgaccaagccttgaatgtgataatatggctgtggaagatgtagagagagaagtcaggcactctggtctctagatgggacactagtctaatctggagtaaacaaacaaacaaaaaagtacaagaataaattaaaaacatggccagttaacgtggatttccaatgcctcatgcataattgacaaaatgtgcattggttctgcttgtagtatagtaaacagcaattctagcagaaattaaaaaacaaaacaaactaacaactggcaattccacagaagtaaacatgtgaattcactatatgcaataaatttcttacttcgaacataaagagggagtaaacatttttataagcatttctctctggcacatcaaatacattttaaacaaatatttaaagaatatctatttgaagcccagtgtgctggctcacatctgtaatcccagctactttggaggctgtagcaagaggagcactcacaggagcctaggagtttgaggctgccactgtacaaccccaccatctattattttttgtctttttagtaatagccattctgactggtatgagatggtgtatagttgcccatgttaatatagtgtattcattaagccaattatttttgcctgcttaagtgtttattactatttttgtttttcttttcttctaaactctgttgatattttaaaaattaggcttacttttaatcatagaattgtagaatttcctggaaaagaatctcacttaaacagaaaaaaactgaagcccccaaatattaagtgagtggctaatgctcccacagtgagctggagacagaaagagaactagagtccaaactttatggcttggaatctactggtttctggtttttttttctttttgttatttattttaatcacatcataggtatttttaatctcttggcctttattttcacaaaaggtttaaattatttttcattggtgttagtgttgtggctggtaaattttgatgtagcaaatggtagaaaatcattggtactgttatgatttatgtaaaatttatttttcttattcccaacatattctcaagtgccccagtagctgcaaacataactataagcagctcgtttctctaccactaaaaattcctaggtttctttgcaaggtgaaagaaactcaatgtttcagtaaacctttttttagttaatatttctttgcaataggattctttagttgttaattaaattgcatgaatctcatgagatattgacacatacacacaccccccacaaatttttgattcattgaaaatacagtcattccgtgttaacactaaaccaatattgtgaaaatagaaaaggaagacactatatgaggtggccaatttttttttttgatggtaaaaaataatctcttcgtaagtgggctactatcttgataaataacaaattttaatcggttaaagtgattagtgaagttgaaaaatgcctgcacattttgatttctgcaaaattcagaaaccttgaacattttctattttgtttctccaaaacagaagggaaataccgctcttcacattgcatctttggctggacaagcagaagttgtcaaagttcttgttaaggaaggagccaatattaatgcacagtctcaggtattccattcagattttccctgatgtacatacatttaaattagaacagttttgtgaaattgatttaatgtgtttagctagctgttctactgataaatttattataagtgctttgttatttattttagccaaataattttattaacctttatgatgaagcttattttttcaacatataatctcccttttaatgtaacttaacactggaaaaatgtaagtctatcattgtctctaagtatttttcaaaagaatataaagtgatttttttcagaatgacagtgacatctgtgaaatatgaattattcatgcaagtttcgtgttactctataaaagtattctctttccgtaaatttaaaatatacttgaaagatttacattccagtggaaaatctgccataaggtgggaataacactactttggtcagtttacacccctaatgtgagctttactaataataaataggaaatgtatggttttaaaatgaaattaagaaaaaattaaacaataattatttaatcaaaattatactataagcttgatccctttttttttctggtggaaaaggggagaaaatgttgttttgcccaaagctttactcttgatatctattatatcatgtacgcatgtggggattgagaaatatatctttataataaaattcattctctctatttttagggttttctcctttgcctttctgataacacagactatatcatggaggatattagcaaaataagccagctctgttccatctattctttgggataacctcaccaggttgcctttgaaggccattgtgtaggaatatgtattaactgtatagttcattcattaattacctaggcatggctctagttctatagatggcacaagttctggacctagaaaatacaaaaggcaatggttaaatcagccctattttctttgattttaattttgggaaaaatctgttgaaattatgatagataagacattatttttatctttgtaatatcatgctattttaattagtcatgtttttttccttacaactcaaaccttcagttggatgcacatcaatgttttaatatgtattgagaatatgccttagtctaaaacccttattagatgaaatttttataatttggtaccatctgtaaagaacatctgtatattttataaagtataacagcattttaggcttggagagaaaggtccctgcagaagctactgctccacctaagtgattcaaaacttttctttttcaaactttattttacttagattcaaggggtacatgtgcacgtttgttacatgggtatattatgtaatcaaatagtgaacattgtacccaataggtaatttttcaaccttcagtcccttctccccctccccacttttagagtccctagtatctattatttccatctttatgtccatgtgaactcattgtttagctctcacttctaaatgagaacatgctgtatttgactttctgtttctgagttatttcatgtaggataatggcccccagctccatccatgttgctgcaaaggatgtaatttcattctcttttatagctgcctagcattccatggtgtatatgtaccacattttctttatcccgtcaaccattgatgaacacttaggttgattccatgactttgctattgtgaataatgctgcaataaacataagggtgcaggtgtcgcatgttctcactcataggtgggaattgaacaatgagaacacatggacacaaggcggggaacatcacacgccggggcctgtcagggggtggggggctaggggagggatagtattaggggaaatacctaatgtagatgacgggttgatgggtgcagcaaaccaatatggtacatgtacacccatgtaacaaacctgcatgttgtgcacatatatcctagaacttaaagtataataataataaacaaaagagtgaaggtgtcgttttgacgtaacgatttcttttcctttgggtaaatacccaaagtggtattgctttgggtatttacccaaagcagtagggggattgctgggtctaatggtagttacgtttttagttttttgagctatcccaatgctggaaaacctttctttatatcaagagaacatctttttgctttagacagaggttttcaaactttagtctgcatcataaccacctgcacggcttgttgaaacccatgtttctaggctcctccccagggtttctgattcagttctggagtggagctgggcaattttcattttttacaagttctcagatgatgctaatgctactagtccagggaccacatttctgaactatggctttagcaaatgtgaggggaaactgggtgtaagatattgcagtaagattcacaaggtatagattcaactacatgactgaatcaataatgtacttatacatcatgaaaatgaaagcctggttaaattcaattgttcagtggaggttctcctgactttgacaggaaattcacctatacattggtgctgttaaaatctgtgaaaagaccatattttactttcctcaaaatgacaaacatagtgttgttataaaagttgactagtagcaaatgctgcaaggtaaatgcttgttaaagctgtgataccagttattacacagtagttattggaaatgtatatgctttggaggcttctcacggagaacaagctaaaaccatttaatcattaactcgctttcagagtcagaggcttttatttataaggtataatcatgccaaattataacagatcttaaaagaagggttgtatcattattaagacgttaaaataatcctatttgtaatttatactattaggtcaatttaagatttatattgcaggggattctgacaaatagcttcaaactaacattcatattgtgcgaaagttttagaggaagaaaaactagtaatcaaattttagaatcttttctaaatgtttttctaagtcttttgataaggcctatgacattatttcctgtattgaatttatgtacccatcattaatagttgaaaaaaagtattattacttagaatattttataatataatgattaaaattaaaatacatgagggttgattattttaccccctgtgtgtgagccaatcccaaaactgatggtttcagagccactgagggctgatttgagttcctccacagatgttatttccctcagtactgtcttatgtaagatacaggattctttatgtgacaatatggggtgtcaagtggatggatgggagacttgcttatggcagttaaacaatctcttccttttgagaaccagaaaaaggacgtagggaatcctgaatgtacaacaaaatgtctgaattttgtattcaagtgataccttcttccacatctttctaagaacataatttaaaccactgaaatgcagaatagtctgaaattataggaacattggcagctgcctagtactatgcctttggcaaacttccgagttatttgcaaacagactgctaaagttatttttgaattaagaagataacaaattttctgaaaaaaccttcaaggaatatattcagtaaaatttttggaattataggttatggggaaatacacacttacggatttttctgcattttgcatataaagtatgagattcatgtgaggcttaccgccacatgatacagtaccaattttggtagagagtgtccttggttcattaagagttccagaacaccagctggatcaacttcagtactttaaatggtatagtgtaattgatttagtaacaatgaacaaatgtttatttttgtttctttgttcaacagtggtatcagtgtggtctctgctgagccagttcttggtgtgattttaagtattgcccctgaccatgtagctctctggcttggttctttggtatcctagattcagtgacatggaggtctcatccatggtgccggaattatggagttagaagtcaaaatcatagagttgaggaatgttatttgctttgaagatgattttttgctttctgaaaacaaagtcacttgcagaagatctttagtaggcatcttatcctctaaataatcctacatacgtgatgttgggatgatttccatttaagctgtatgggacatttgtttggtcacttttataacctgtaagtctgttagactcagagacattacttttaaaaaaatgttcaaatttcaaattctatattgctatcaaagaaactctacttagaaagtttttaaaaaatattctcaaaatcatgagtttctttaaatacttgtagcactctttgttgacattttgcctattgatatttgcctatctctgattgcaaaaaaaaaaaaatacatctttaatttctccaagatggtaaacttcttgggagcagataattttttctcacacttctttatagtttcaggattatgcataataccttgcacatatatgattggaggatgaatatatgcatgtatactctttatgtataagtcttagctttgttgtgtattccaataactcctaacagtagacattaatattaataataatacaggtaataacattgactgccaggcattgtctctagtgtgttgtgtacattatctcttttgatattcctttactttatcattattgatgacaaattgagactcaggtggctcatttacttgcccataatcttcatccccaggcaatattgcttctcatagttcccgtaacagttctaccttctctacagacctcaaagaataatttttaaaattcctttttcttctagcccaaatcctattcaggtccaaataagctgattttcttaaagtagaatccatgtaaaaggtttaagatggaatttctcacttaatattttttatgaactataaatgtcctgcaaaatgttcaaaaaatgaaggatattctgctgttaccaccaaggaaatctggctttagaatttcccccttattattttctccacaaaaaaaatataatttttagttctcatataagagaattttttctttagatacttattattaatatattctctaattataaaatcattaaaatcggaaggagcactctaaataaagcaaaattgtcttaaaaatgttttttattattacaaagcaaattggtttatataatgtatatttttacatgataaaaaaggtaaactggatcctagactagacaccatcatcaaacatgagaagctaagcaaaattttggagaatgggtatggtaaatttcccttccttttaggaaaatatgacttttttatagaagaagggaagggctagaagttctcatgaggctcctcaagaagtttgtgtctggggcggtcagtctgccttggagcaaattccagtgtcactaaactacagcccagtaataatatcttgcattcagacccttaattttaaattgtatttttatttatttaatctcatttataattatgtgaatcaacaatgaatagtctcattttggacatggaaaaatttgaggcataggtaggaaaaccaaagtctcataacaattagtgatgaagccacaaacctgtggtcattggtacggacaccttccttccaaataatcctaggcatacctcagtctttcccactaaactgttgtacaccttctacttgaattagggaagtccaaaaccctgcttgcctaggcgcttagatgctgctataactaagagccttccgcaaagctaggcaactagtgagtaaagcgattcaggtgtactgggagggcgtatccataatctgggcttcatacaaccatccacctcttagactgttcttcaatcaaacaaaatttttaacatgtgtaagacttggccgggtgcagtggctcacgcctgtaatcccagcactttgggaggccgagacgggcggatcacgaggtcaggagatcgagaccattctggctaacacggtgaaaccccgtctctactaaaaatacaaaaaaattagctgggcgtagtggcgggctcctgtagtcccagctacttgggaggctgaggcaggagaatggcgtgaacccgggaggcggagcttgcagtgagccgacatcacgccactgcactccagtctgggcgacagagcaagactccgtctcaaaaaaaaaaaaaaaaaaaaaagacttaaatataatttctgaaattggtgatgtccttttcaattcatttttcttatctgtctctacattcttctacttgttcttggaatttcttgtttctgtcctctcataaggattctagaaacagatttgttttcttttcatcttattttaatatcaagtgagttcaaataagatgttcttacttggcatttttgatatctcactgaaaatttatttccatttttattggttatttttgcctgttttgtgattaatactcttttctttcaatcctgaaaatattgtttcaaaagaaggctttcctatttataactcaaggatgattaggtgattattttattagcttttggatttctacagaccacgactattaattccagttgtaagattatatcaccattggttacacccccagatttatgggggtgcatgcacccactatatgcaatgataaatgtcttttcagttgtggcttccaatagttttttcttcattggccctaacccattgtcacagacaatggaattgaactgtgaagaggaaggaaacacacacagttggtcagcatgcccattaccttgaattgcttccatatggtcttagagccatccttggctctgaaagcaaaaacttgtaatggaacattctgttctgtgacatatgcacagagacacacacatacatggatgcacacatatgcacacacacacatacacacacagtgtataaagtgggatctatagtcacagatttttttaaacaggttttattttcagggttttcccccaaaatatatgcatatggttcttttttcctcttttttaaaatttaatttaaatttattttaagttccaggatacatgtgcagaacatgcaggtttgttacacaggtaaacatgtgccatggtggtttgctgcacctattaacccatcacctaggtattaagcccaaaatgcattagttagttttcctgatgctctctctccccctgccccctgacaggccccagtgtgtgttgttcccctccctgtgtccatgcattctcattattcagctctcacttataagtgggaacatatgtttagttttctattcatgtgttagtttgctgagaataatagcttccagctccgtccatgttcccgcaaaggacatgatcttattcctttttatggctgcatagtatcccatggtgtatctttcttaataagggtcttgtttttttttccattgggagtattactatctgtaatacaaatcctttgaaattcaaatgaaggcaggtacttgcatttgacaaggaataaaaaagaagtcaggacacttgtgtttttgactctgaaaatcaggccactgggtgattacaaatttgcaggggcatctgtgctcctcagcactccaagttaaagaaaatatgctttttccagttctctatatgcttgggaaaaagatgagaatcgatgtctttaaagttttgcccaggctgggtgcggtgactcatgcctgtaatcccagcactttgggagactgaggtgggtggatcacttaaggtcaggagttcgagaccagcctgaccaacatggtgaaactgcatctgtactaaaaatacaaaaattagctgggcttggtggtgggtgcttgtaaccccagctactcaggaggctgaggcaggggaatcatttgaacctgggaggcagaggttgcagtgagctgagatcgctgcactgcaccccagcctgggcaacagagtgagactccatctcaaaaaaaaattgccaagaaagacattactattctctattccagtaaaaagccaacactaaaattactactctacaaagcgtgcacacgcacacacacacacacactcccacatcctaaaagacaataatattttcatttataataaagtaatttttcaacttttgaaataaaattaatacaattatattttgcctttatgctcatttatctggggacagatggtatggaaaggctgaatcctgcttgtcattttattctgaaatttgaatgaataatcgaagacatcatcacatctaaaatcttcggtagatgtctcatttatttatcactacacaggcctatccaagtccaatgttattgcattttaaaggaactaaatttgtagtcagttaagacttgtagggagaaaagtaaatggtctccaagttctgttaatagaaatagacttcaaattttacataagagttacttctttttctccccttctgagttaaaatgaaagataagctactctggtagtaaatggttaaaatagtactgtagcattctgcttcttacctcaaatctaacagcattaatgtgtatattccacaacaactaagaagctaggtgaaaccatcaagaaccaaaatggtgatcctttgaggcaaggatcacaaagcaaaaaaaaaaaaaaaaaaaagaagaagtaaaaacatgacacgaattaaactttccaatagaaactgattggaagtaataattcacgcactcactcactcagcaggtatttgggcatccagtgtgtgccctcgaacacttgctaagcctacaatgatgaggtgggcagggggcatgcggaagaagacctaggaagtggtaactgaacttcttttataaaagaaagtgttaatgcgcacatcagcggtcaggggatgaagtgtgctatgggcaaatacaatcatacatgcaagaacctaaaagaaatgggctatctggaagctgaaacatccaggggaaatgcagtgtatgaaatgaagcctgaggaagaaagtcagatcctgaaagattttatgagccatattaaggttttcgttctaagacttgtatcctaagcccaatatgaagctggcttgggggtggaacaagctcaggattctgttttggattctgaaaacatgaccctggtgcagcttggagaacaagtcgaagggagtcaggtgcaatgcaaagcaaatcatttggagaccgttgtcatgatctactccatataagaggtgatgttagcttggaatggagtagtagtggtctggatgatggagaaaaggggactgttataagactgattaaggaccagtttcagagcacttgatgatgatggcctatgggaggagaggaagacgatagtgtcaatagatctctcccttgcctaacagtatagatggtaatgcaacactataatataaaacagtgcataaagacaaagatttgtttgtttattttattttattttttttgagatggaatctcactctgtcacccaagctggagtgcagtggcatgatatagctcactgcagtctcaaactcccaggctcaagcaaccctcctacctcagctttctgagtagctaggactacaaacatgcaccaacatgctgaactaattttttaaatgttttgtagagacagggtcttgctatctcgcccagactggccttgaactcctgggttcaagcagtccttccacctccacctcccaaagtgctgggattataggcatgagccactttgtttctggttttgtttttggttttggtgaggagagtaagagatcatgaatagcatttgaactgcttgttatacatccctaaaagaaatataagtggttattacatcatttgatgtaaatggttattaaagcagtggactcgaatgagactgccggagcagtaaagacagtgaagaggcaaagggcatacttccccttcatcctctgaaggctggctaaaaatcaactaacagaaaggcagattaataggagaaaaggaatacaaatggattaacatacatgggagccatacaaaactataacaactcaaataaatggccagatgattgacacttttataccattttgaggatacagaaagaataggggcctggagcatggcaaaacaagttatgggagggggagaaggcgaggtctagctaacaaaggaggtcttgctatatagatgaaacctcaccagtagtagtagcccttggagaaaatagatggtgaatgtttctttcagacctttgaagatgtcagactctcagttcactttttctagatccagacaagggagggcccacagagaaagcctggctgcatcaatgcagattctctacagatgcaaatctcccccacaggacagctttgcagggctacttctttttgtaggccctctgaacggccatctcaaaatatgtcaaagaagaatatttgttatcgaaccaaactggggcccactcgccctgtatagcaataccagatatccacaccaaggttttcagcgggagaaaggaaggtgtttattggcagggtgcctaacaaggaggatcaggcagctcatgcttaaatcctgacctccctgatggcttgcaggtaaagatttttaaaggcgggggtaaatttcagaaagcagaagttacaggcaaaattgtaaatcaaaacatggaggttccacattggttttggcctaaaaggtcagagtatcttgaagcggaggacttacaggtcacagattttctgatttgcagttgggtaaggaagagaagctttgtttaaaaatgtagggtcagcagaaaagaatgttagcctgggttcatgggcatgacttttttcaggcccctcaggaggaagtgtaaaacaaagaatgttggccagagttcagtcctccgttcccccttaccaggggcttctgtgccagcagatctatttggtgggggtctgggtttctgagacagaactcagagacatatgttaagatgttagcttttgtgcctataggggaaccaaacatcttgtgattctagcttccttggctgctattaccttcttgctcatcaagtttcttatttacttctcagggttagctacatgcctggaattccccttgaaggaactcaagattttcctttatttctatgcttggggagcctgcaggtccctaagaggggatccctgctctgtcttctattttggggataaaatattttggtttcctttaccagcaagagatagaagagggtttatgttttagggacaattttcacattgaagaaaataagatgaagaaaatttgaggcatatgtcaaaaaaactgaaaaagttataataattgaccagaggactttgggtccttagtataaaatgagtaaaaagtagcaggcttggaagaattaaaatgagagctaatcaagtccagtgatatcagcatttgatttaaacctggactgtcttcagtttagcactggttagaagcaagaatccagagtcagataaactagatttaagtactgcttccatcactcactagccttgtgaccttggacaagttatctcccatttctgtgcttcaatttgcttatctgtaaaacaggtaaggaataattacagtacataaaattgagtttttgtgagggttgaaagaaataattatgtaaaacgcttaacacaatccttagcatataggggcactctacgttagttgctgttgttatatttattattttcattgttagcttcatgagcatgggaaggctattatactacctttgtgggaagcacgagatcagtttttgttggttctttaggtcctgaattactttccctccctatttattagatttattgattcttaggaataagaggacaaggaaatctaaattcattcaaataattcaaatctaaatttgcattcaaataaagaatattgcactcaaataaagaatatcagaaagaagcagaggagagcagtggaaataagtattgctcaacaaaatctataaggactgttgatagaaacctggtaacttaactgatggagaagagagatgaagaataaaccaaattctatacattcaactgtatcaagatagtcagatcagagatttggaacttctattcacagacaattataatctgccagactaggaaaggattcttgcatcaatgtgagcacaatgtatcgagctaatgataatttgtgcatcattcttgttcataactcactaacatttgacaattggaccaggtgcaaaggcttgagaggtggcagctcttttccttctttcacgtaatgtgccattgattaataatcaaacagcttgcattttggagtaagtctccacagacaacatcatctaagatggatgttttggtgttcttcctatttcttgaagttttttttagaaagatctcaaccttctaggttagcattgtgcattgtgttttgaccaaaaattgtggaagcaataaaatgtagatagtgttttaactattttgaagacaacttttccgtaaacaaatgcaaatattttgctttacttggggggtgtgagagcctcttacattcttcacatattatactcttaactaaatcacttcagtgtataactggaaggggctattagagacattgtgtccataacacttattacaggaatttgaaattcacagggtcaagtgtctcatccaaatttgtgtcttctgatatctggctaaatactccatatgtttgtaacatgaatatattctattttaagcaatcaaaacaatgcaaaagtatatggagaacaaacctaattctccattcccaactttcaagtacaatggcctttctcagaagtattttttttgttcctttctatacagttaaattctctttatgctatattatcttgctttataaacaattacatctttactgctccttaatggagttctccagttatatatgtctaaaatcctgaaaagcgtgacaatatttattgacaatattttattacagcttaatacataatttgcatagatgtcaggcattgctttcttcattttatacagaggaaactgagagtttaggtaactgcctatgtaccaaaagtgatttgatttaaaccccaaactttgattaattacataatcattcttgaaagatgaaaattgtaatctgtattatatcttatttttttcaaagttttcatatttggtgcaattactaataactttttttcagatattattctttagtgtttatttcctttcttaattgggaagatatgcaaagcccagtaattgactaaacatggtaaatataaatttgaatgcatgtacaatacagttagctatagctattaatacctatctatgtgtaataattggaatcctctggttatttctactctttatttctactcttaaagctatgaagaagaagtttttaagactttaaaatggccagcgatctcttttgacattgactgaggtaggcagcatagtgaaatggataagaacgcaaattctgaagctaggtggtcaaatcccagaggtcaaatttcagctcttctgctttctactcatgtaactcatgagctattctgctttctactcatgtaaatgtgtctcagagttctcatctgtgatagggggatcataataacagtaccttcagcaaacagttgttgtgagattaatccatgttcggcatttagaacaatgcctggcaattctaagagctcaatgactgttagctgtcattgttaccaaattcagcactagtgcagccatgcaagaccagccattctgtatgcccactgctgccttttcttggcacaatgaagaacataacaaagtcagtttgtgtgactggcttgtttcacaacctccttagaacactgtcaatttgagtatatgaaattgcattcacctaaacacaatgcctaaagacccttaagtaatttaattgttaaaacacttatagtatagacattgatctcctactgagacttgaagcttcaagctaatgggaaaaagaatgaagattctcatcttagatagtctggatggtgaaaatagaagtccaactaacaaaatgtgttttaaccaaatattatttttgaaaatcactttcagaaggtaattctaagtctggaaaattctaaatggaatatcacaaacctaaaatgtattgtgtttacatttgcttgtgtcataatagtaaaatgatttttgaagtgtctataatataatataccttagaacaaagtatcagtgaagctaaagtcacaagtttaaaaatgtgaagaaccaattttaagctgctatttaaaagatatctaatgttcttgattatatgggctaggtttctataaatgtaaagttccatgcaacacctgctatttgggcaaatactatgtgggcagctgtctcaaatataagtcttgagaagggctaataggtcatacttttatgggtcagtgtagtgttcccctataatataaatctttgattcaatattttaatattcaagtgattcattaatatatgcaaataatttacattgatttaatttaaattttaatctgcaaatatgccctctggaatcagcccgatattcctagttggctagttttaaaattttaaaattaattccagattaaatagatcaatagattaaatgttaataattgttgaaaagcatccaactaggaatatcaggttctttgcagaggaaacgttccaaaaaccactgcaaacatcagtattctcattaaaggcagtaacaagaaaaggattcctgtttgcgatactatttgacattgcaatcaatccctagccagtgcaatgaaaagagaaagagaactatgaatataaatggaaaaagaaacgacaaaatgctgttttatttattttttttttttattttttttttaagtacaatttccattttatttttctccagagaatagcctgtcttcagtctttaagaactcagctccttacatgggctttggtgggggacgtggggcagcacccgcaggtctaaatcggggtgggggtgttcggtccttgcgggcttcacgagatcgattcctgactactttgctgtgaattgcacaactcacacagtaatgtagcttcacatacagcttgggaagcacataggcatcgaagacgctcgcttcagaaatgtccctgactgctgcggcctccactatgtttcgaatgacgaatttcttaatggccttgtccttgggcacgcatcgggcacagttagtgcagcgaataggctgcacgtggccgcggccctttttggcacgaccattgttccttcttttctttgtcatcttggaggcacggaccggagagaggagccaaaatgctgttttatacagaagttatgattatttaaataaacaatctggaaaaatctacaaatcaattaataaaatatttattacattcattaatttattaagagcctgttgcttataatattcaataccatgaatcacagaattgttttgtcatggtatttgactaatattttcttcagcctaaaggttgacatgaatcattctgtaaaaaatttattactaagagtattaagcagcaagtttttatgtatgagcatggtaggttaggactttaaatatcctatctgaaattagactcgtgaggcaaaggtcaaggcatcagagggtgcttgcatgactaacttcaactatattttttattcttttcaaatcactgggaaatttttgtgtaataattttgaaatgccatgaaatcatatcactgtgaaagtacacatcatttcacttacaaaaagtggccctttagaatggtggatttgcaggaatcaaaacacatgtgaaccaacaatgtcatcaaaagacatttattaactattttattgtacaggagactctcctgtatgttgtctgaacataactgggtacaatcttttaaatcataccccttaaaaatgttatgtttaaataacatattaactggaagacatgaatagcaggaaacatacataatataataaaaccttcacattaaaataaaaaacaacatgggagagcaaaataaagacattactaagtgaggtaaatgcaggagcagggcaaatcccactctacttctgaacaggagaggaaaggcaatgaaatatgtttcattaatccactatttgtgtgaccttgggcttattacttaacctcttagcgactccattccccatctgtaaagaagggataatagtatttactacagagggttgatatagagattaaatgggttagtacacttataatgcatgtaataagtgcaatataaatgttagccacttttctaatcattagatatatttgtattatctacttaagttattgaagaaataaattgactggagttgagaacaatattgcccaaaatggctaattctccattgagactgagagattactattttctggagtggggagtggagaaaagattgtacagaagtttcatcttttgtgattagcagcatattaactttaccttggtataacatagttttggaacacagggcctgaatgtgaataattagaaaaagcatttgctacaaacagccagaaaaaaatgaatatattcattaactatataccatatgccaagcactgttctagctctgagaatgcaacaatacagtctttgctttgctttcttaacttttggtagttaaacagttaaactaaaaacacaaaaacaaaaacaaaaaaacccactttttttcttgtgttatcttcatctacaatttttctatcttctattattttatcataactaatatttttaattccagtatttacttaacaaatttatttatacacaacttaataaggaaaggtattatttgtctcttcttatacatgaaaagcacattttgaaggctgaaaataaaggattatctgcttagaaagagccttttttcccaactgttaaatcgggctactctgtcatcattttcttgtggtatttcaagtttcagattctaaatcttccaccttacactaggagcaagcatttctggcataactatttcatcactaatatttatcatcatctttcaattgactgagaaaatgactaaaacagtataaatcttcataaattatttggcagtttattgttacctcctgattttatagtcaagaactgtttgaggccaagctacagaatactctcagcaacctcagacaataaacactttctcgaagcctatgcgtagcacagtttataatgccaggaaggggaagcactatatattgacatatctcattctaattttagacttttaaaggtgcttacatctaaacaccctgattctttacttagaagaattggtgaatactcacttgccatagctaaaagaaagataaggaggtaagaatcctgttgattgccaatgaaatgccttatgaaggcaattaggcctgttagggcatcatcttttgaaagcacaataataaatatcatttcagaggccaaaataattattgttttgtgcagtcttgctccagtaaacacatctaacagatcatccttatcagtttttgggggtacattttgaagccaatatacccaggaagaacaacactcagaacatatttttgtttaaaatctggctctgaacacaagtataacgagtgggcagagcatacttaggtccttttaagtaagagctttgaggagcaacaccttcccttaaagttattggggcccaatttgtagcttttgtactttgggatcaagaattttatccatccagatttttaaggcagttcaaacactatttttttttttaaaggaaaggcttgctatagaacgtctttgttggaatgaggcagcttctgtgtcagtaagggtacatcacactctacaattttcacgatttgcatgaatcaaccttgccacatcatatgctaatcagagcttattcctctgatgaaaacttaccttcatttaatagtgattcttccctcgacacatatgagaattcttccaaagaacagccaccggtacactagacagccaactgtgtgttctctgtcctttgtatgaaatcatcattctagatggccaaaaacaaaaagcaagttctcctttatcaaaatatgagaactcccatctctatcacatttcccttttttctgtggctgccaaaagcccaagtgttcaattattgtacctcgttcattctgagttctggttaccaccactagaggactacaactaaagtttgttcggggttgcacttatagccctatcttgactgtagatatatattttaaccatatatatataaagtgtttcaagtagccttaaatttttgaatgtgaatgtatttcaaggtataaattataactaaatactccaaagcagcggttgccaaggaccgattttgttgaagacattttatccatgagcagcggatggtttcaggatgaagccgttctgcctcaaatcatcaggcataagattctcataaggggtgcgcaacctagatccctttcacaggcagttcatgagagggttcgtgcacctgtgagaatctaatgccatctctgatctgacaggaggtggagctcaggcggtaatgctcactcgccgcctctcccccgccccgactcaccttctgctgtgcggcccagtttcagtaccggttcatggcctgggggatggggacactaagtctcggtaccgaactgaatggttccatgtgttgtctacgtgaggttttgagtcaatgcgttgaagatgtttattctttgaggttttatctttggcaagttgtgaattagaatttgttaagcagctgctaaatattgagtatatcactttttgtgtagtgtaattgtcttctccatctcagcactgtctgggcacactgcctgctctaactgcctagcagcttttaaagaccttggataagggtaagtcagcacagataaaaacccacacttagtaatggacaagatctatagtaagactttcattgtgcttaaattgctctgttgttcaaacattataaaacctatttataaccccttgttctaatgctctaacctttactggtaaaatacatgtaatatgatatgaaacaagactttgattattttcaaaactgttaataccagacatggagtgagaatagcattataattctgacgactgttgagaaaacacagcaactattttagaatcaaaaaaatgaacctttttctttggaaaattttttaaaatttggaatccccttggaatgtgtcagtatatttgtgtcagaatgcatgttttaatttttgaattgccctgcaaagttaattgtcagtttaacagtaatcattaaatgaccaaaaaaaaaaaaaaatgactgacattgatgaagaaagcaataacttcatttgattggagatttagatttcctgggtgtatatctcaggcgataaaaagtgctatactgctaccatctatatttattaacaaagccaagtctactagctgcagttgacaggagtataggaaatgtgactttagatgagttggtctaaccatatcatatagtgttttgatgttaggtgtgtttttaaaaacttggagcagcattttattttctcaaagacagttaagtagaaataagaaaactatttggtagtcattcatttaaataattttggggggtgtaatgcatgagagaagtaaaagagttatggcttattctaagtggtttaatctagaaagtcattttttatttttattatattgaatcaaccttaaaatggtagaacaataaccagttaagttaatactgtagcttaatgcaaaataattacttcaggttaatggattttgctctgttgggggaaaataaaagcaccctatagcgattgttattgacttaattttctcaatgccataggcctatacaaagtagtcagcatttttgcttttggaggtaacacattttctcttgcttctaagttactaggtcatgtattaaattgctcaatatacctattttaatgcactggctacatgctgagcaaattatactacatactgaagatctgaatctagtaatctatgttgttagacaatttgaaagtctagaaaagtttctttaaggaaatctaccagggaattaatttctacccaatttcaatattcaaatatttattaactttacactaaaatttcttctctgacatttagacattttcattacttttataacaaattgggtacaacaactgtaaaatttaatttttattatttaaattaattatgcatataaaaataaaggcatttatatattattataaaattttatgtgatatggtgagcagcacttaatctaaaataaacttaatatttctattgacaacttaaataaaagcattatacattacaaaaaacaatgaagaaaagcctactgctgtgtatcttattttgtgttttcccctcacacagaaaaagtatttttaaaatctcatcacttgcaagagcagatttactttcttactgaaaatgatccacctgcttttttgtagtttaacctcatacttgaaaatctattttagattttctctgcagatgatgtgtctcagggtcactaaataatatattttaaccataataatgttaaattatgtttttcttactattatttctgtgacgtgttttatgatactcttcagatttcctggaaaatgctcccttataaactaatggcagtggtacaaactatattttggtatataccagactaggatataccaactaggataccttcaatcacaaataagaaaaacagctcctcattagataaacaacaaaaagggggttttcttggctttcataaataaaaaatgtaaatgggtataatgagctctaagattgcctcctgcccatctggtggctcattcataaccaaggactcagaattgtttttttcctctttgctataatttctacagtgccagtttatcctcacctggctttccttgtggtcctaggatcggaaccacacattttcttgttcagactcaaaagaagggaacatgtctgtcctagctttccaaaagagaattcgagtttggtggattgaaccagcttaattctcttgctcaaacttaaaccagcattaccaagagaatgtaatctgctgattggcttaagtcatttgataacctgtctgggcctaggagataaggagagaagttcagctttattgtaattatgtgaatcttactggaattatatggggaaacataggtactctaatgaaaaaccaggatacttccaagaaagaaggaggatcctgggtaggcacctacaaatacccacttctatagcttggatattccatttttaaaaagttgtatgttttgtttttttaaaaaatttatttgttttctttttaaatttgtttactttctctatgatttttaaaatattcatttgctttcttattttttgtttggaaatccaaagacataaaaaacagaattattccatcatagcttaacagtttagcaaggtctttgttcatttttgcaaagtgaaacagagagagaaaaatgttttggagttatgtgagagtaaataaagcattactagccatctcaacttttctgtagaatggggtgatggtaattcagctattaaattcaaatgttgaataaaggagaaaaacacaaatctaagtcatctataattgtcaggaactaaggaaaataaggctaaaagtaaacttttagtcaatcaacagctatttattggacacttactatgttctcagcacaatgctgatttctatggaggattccaatcaagtgtaagagaagaagctgctttcacgaagtgtataggctacacacaaagtcaaggtgaacacacaagaaacaaaggcaagcaacagaagacactcttggtactaaattatatggaatagactgtgtactagagaggaagatttggaatagcctagattttgttaacgaaaaactcacagaggactggagccaggcattgactcgtagataaggtctgcagacaggaaaatgcaaaggaagactttgcagatgggaagattagtaacaacaacgtgaggaggtagaattgagcatgtgagtgtagaaatagtggtgagacaagttggtctggagcaacatcacaatatgtattaaaggtttgttttcattataacttactgagtaaaatggggcaaggatataaaaggtcttgatgttcagttattgtctatgaaaactgatctccagggctgggcgcggtggctcacatctgcaataccagcactttgggaggctgaggtgggcaggtcacttgaggtcaggagtttgagaccatcctggccaacatggtgaaaccctgtctctactgaaaatacaaaaattagcaggcatggtggcacaggcctgtaatcccagctactcaagaggctgaggcaggagaatcgcttgaacccgggaggcggaggttccagtgagccgagatcgtgccactgcactccagcctgggggacagagtgagactccacttcaaaaaaaaaaaaagagaaaactgatctccagtcacagtcagtaaaatgacaatgtagataagtagtttgttgaaaatagattttaagaagattaattcaggttgctgtataggatgcactggaatgagtaactggaaacatgcaaaatagttcaaatgctttcttggtaatttatccatgagaagctgaaagcagggatcatggtagacccagagagaatacagtattttctttctgtttgctggcaataaccagacatggtataatatcatctgtggaatttgctgttaaaacacatggcagaatagtgtagttgaaagaacatgaattttggaattagttaaacatgggttcgaatcccagctccatgttttaagtaatgtgaaacttcaggcatgcttcttaatccctgtgaatgctaatttccttgagtcatataaagatacagtatttgtttcaatggactgctggcattaaataacgaatgtaaagtgcttagacttctctcttcttactaacaccacccaaatttcttacccactggaaataaaaactggaagaattcctatgtctaagaaaacatttgaacattcttcatcaagcaggtcatagaaattccataatgtcacaaggcagagctttccagctcatccctagtaaatggcttaggtgaaagtaaaaggaagttaattgtccaattgctagataaaagtacaggtgttctctgaaacaattttttttttttttttttttttggcaacagggtcttgctttctcattcaggctggagtgcagtggtgcaacctcggctcaccgcaacctctgcttccttggtttcagcaattatcctgcctcagcctttttgagtctgaggcagtttgatccttattgaaaagggcagctgagggagtaaaaagagtactgagtttggatccctttagggttcagatcttggtctcaccacttggtgtctccttgggtggataactgtgagccacagtctcattcgtaaaaggagcctaatagcatagttgtggatataaaacaggatgacacagtaaacacttgataaaacttaacctccccagaaagatttaggacattagtcattttaatgtcattggatagtttaactatgaactaatcttttaatcatctttggagagaggaaagtagttaaaataatttataatatcctaaccctggctaagaattgtcaacttcagattatctgagaaaatgtatatgatactttaattaataggatgccttcttaactattaatactaaacaagtatataatcatatattttgtccttttcccttaaatgctcccccagagtacacaaagtagtctttatttttgtgactacaattagtacccattggttttttacatcctttgcagctgtgccttcacaatatatttagggaaataatttgaatcatcctgaccttaaagcttggtgacaatttggggatgttttccaacttatctttcataatgctaattccaaggaagaagaagatgcatagtttctgggatgggaattagagtagtatttcccaaccagtgctaactggagtctgtgaacatcctcctagcatgtcgtggttaaggctgctgaagagttctgctctgtgaagaaacttaaatcttgacgttgacctgcctgcaaaagatggggtgcttcttcaaaagaggaagtctacttacaaaatttgaacccagatctttctgtaacgattcttatttcctactgttggacttggttatgtaacttattgagtgtgttttccagtaaatatagagtatataatactctcagaaaactggaaatagcacatggaattaagggtattgtaaagatttagagctgtagattttagaggttccaggtaagatagcatttgaagagctaaatgactacaaaatctgaaaataaatgtctaagatatgagtttcttttccaaacagaaaggaagcatacaagttgtaagagatgtggttggcagggtaggtgagggccagattatgtaagactgtattagactttatgtcagttggctattgctgcataacaaattatccccaaacttagtggggatattattagcttaaaacagcaataaatattatcatcacagtcactgtggagtggtggcttagttgtgcagagtttctcataaggttgtagtgaagatgttaaccagagctgaattcacctgaaggcctttctagggctagaggattccgtccaaagctgattctttcacatgtttggcatgttggtgctaattgttggtagaggggtcagtttcttccccctgtgagtccttccataggctgcctcagtgtcagcataacacagcaactcatttccttcagagaagatgatccaaaagagacaagaaggcagaagggcagtgacttttaaaccttagcctcagaaatcacgcaccatcaattctgccatcatcagtgctttagaagcaaactactcagatgtcctccattcaagaggagggaaatttggctccactttttgaagtgaggagtgtcaaagaatttgcaggtgtatgttaaaaccaccacaggtataaaaaggaatttgaattctgttttactttattcctttatgtaacaaatatttactgaacacctactaagtgctaagcatttttatgggcactaaataaagcctctcagagagagtaacacttatgtcgaggcctgaaagattaagaagatatggtaagagtttccaacatctctgcacttgctgtatctgttcacctcctattctctcctgaacctctgtaactggccagtctccttggtggttactcaatctctgggttaaaaattcctcaactgtaaaatggtgacatctgtttcagctgcaacattttcatctaggaaaatacggcagtttcttttaatcactgaaatatatttaataagcttagcaatgtaacattgaaagtaaaaacaaataaaatgagtagtttacacagatattttatgtaatcatttgaaatttccataatcattttctactcttgtgatatattttagagaatgtgaattagcttatgcatcatctatgaaattacctaaggcctatctttagctgagtggtaatattgtagttttctatattaagtggtaaaattgtagttttctatattaagttctggctaagagatctttgaagttttttttttttttttttttaattttaagacctgtaagaattccttttgagatgcattcttgcactggcttttacccatgctagtaatttctcttactgttctttcactattcattagactcaggtttagaggacaaaattccccaagtgaaatatgtgtctgcagcaaagacactcatacttcccctacaaacaccacatcttttgagagacaatggagcaagaagagaaaagaacaataaagaacattccactttctctgtatctgccatcctgatttcatttagacctcctaatgttctctctgatctgtgtgcatgggccataatataccttcttcacggagttaattgctcagtctttagtattccagcagcattttattcatgtttctcttttggaaattatagtatgtctggagccttaaatgattctatatagatgtattctgtgaattgtcattttttttactcttgagagcaggaccccccagtgcctaggaataatttttagaacaaatctggtgctataaagactgttgaaaatgaatagtcacatttactcttatattaagataaaagtaattttatatgatcactctttttaagccaaccaaatgatgaatcttcacttgtgtaagggaagaataaagttatgcatgccaggaaaataaaggctgaaaagttaagattctttaaaattgataataatgacaatgcttagagttgaagttcttatccaaaacattggtgttaaaccattcattaccttgtatattaacagtatttttctctgtataatttctttgaaatgacttataaatatcaataaatttacttgctttaaagattttccaaaagcttcattaaatctacatctgatatgtaaaaatataaatattagctcttgcacattcaatttgtcaagataatccaattaccaaaaggaattttcaccattggctaaaacctgattactggtttatagtcatattactaatgtaaataggaagatatttttgtaataagtgtttgaattccctaaaatacagcatgatttctatatttgaagaaaagcattatagctgtttaataaacctgagaactattatcaatgactgataaataatacagactgaatgcaatgcttatcttcctaatcgtgaaacagagtataaataaatgaagagtaaattacattttaaaatactaagatcatattaatacttgtaattctcacttcttgggatttaacaaaaacctgctttccactcttctggactatagtctggcctctgttttccaatgtatcctccccattcctcgccaagtaatatctttaaaaatcaaatgtgtctgtgtcaaacccccgtacaaaaaccaattcctcgcaaggctttcagaataaaattcagactcctcagcacggcagacagggactgatccctgcctatctaagctgcttctccccagtaacaatgcattaattgtaagtttccgtatgtcctgtgttgtctcattgcacggtgttccttctctttcaaataccttgcctgcttctgtgtcttcagtgtcttccagctgttactcccagtaacttcgttcagatatcatttccttatctagttgaattatgggtctttcatctgtgttctctttatatccaacacataatttaaaaaaactaattatataggtgttcactaaagtgtaatacagaattttgctaacttgtccatctcagtctctgggctgtgaattctcaaaacaggaaccttgaattttgtctctgaatcattagagctgaacacaatgcctagcagtgaaaagtcaccaaacatatttttgttgagtaaatataatgaataacaaataattcatagttttctatggacaggagtaatgttcaaaatatttaataaccagatgctaggagcacctgttggtcacaccagaactactgtaacaactggtaatgctgtacttatttcacccacccagtatcagcctgggctgtggatatctttgacttttttataccaaaaaggagaaaatgcatctattttcatacctacatgcaactagagcctttttagaaacacacagagacataaggtgttggaaagcacctggatgcatatacacagaagccaatacagttgtgttcttaagctattaatatgtgatgataaatgctttcctataaagtttacagtggtgttaaagtgctgccatgccttgtcctaattacccagaggcatgtttcacattctccagtgggctattttttgttgttaaataccagtaagttaagagagaataatttccacattttaaggacctgtagtaaatctttattgccttacttcacatgttttgtaacaataaacaatgctccgatctcccaaccaaagcttccttcatcttttatgtacactattgcaaagggtactgcaggagctgattgacaacctacttccattcttgtctcctagcaccccaagccaaggcatctgttttcaccagaatgaactttctaaaatgcaaatgtgattatggtacttcctaccaaaatacattcaacttttctgcatcacctataacaaacttttcaaggcaatttaaaaaaatgtgctcttaaaaaaatgctcatttttgggctttacacatggagactccaattcagtagggatgaggtggtagagtggtacctaggcactcttaaaagctattacaggagattctatcacacagccaggctgaggaaaattcatccacaggatggagtcctaataccattacagggaagagactattcagtaactgccacctgcctgtcactcccagatcacttattagctcaagactttggcttaattacgtaggtatttgagcctcagctgcctcagtttgaatgaggataatagtacaaatgttgcagcaccattctaagtattagatatagtattaggtcatttatcatccaaactgaggcactattaataattacttcaggatactatgataaacttgagctgtcccagacaaactagagcactataatttgaggagatacattcaaagcattttttacagtggatataacagaagctcaataagtcacattcatttttatcattcttcgcatttgctcccctattctgctggaagttgtagcacaccagggtcatggtgcaaggcacacatgtgatgtttgtgaaatgctctaaccaagatcttgaatgtttgtctatcattactcttctccccatattcttgatactttcttccttgattttttttgttttgttttaactttttatttccataggttttaagggaacaggtggtgtttagttacatgaataagttctttggtggtgatttctaagattctggtgcacccatcacccgggcagtatacactgtgcccaatttgtagtctttatcactcagctccctcccacccttttcccccaagtccccaaagtccattgtatcattcttatggctttgtatcctcatagcttagctccccctaagagtgagaacatacgatgtttagttttccattcctgagtttcttcacttataataatggtctccaattccatctaggttgctgcaaatgccattattttgttcctttttatggctgggtattagtacatggtatatatacgtaccacaatttctttaaccactcattgattgatgggcatttggggtggttccatatttttgcaactgtgaattgtgctgctataaacacgtgtgtgcaagtatcttttttgtataatgacttcttttcctctgggtagatacccagtagtctcccttgatattttttataaaccttgatattcccctcttttctcctactttagctcatctctttgtaagtcccaggacaaggaatgcaaaagaggcccgcttgcaatatatttttttttaaattaaaaactacatatcaagctaaaaaacggttaagtatctcctactttgatgggtaaatcatgacaggtccaaaattagacatcctggaatgcttggagttgcacacaggactgtgatgagggcaatgccactcctgggggcctaccacccagtcccctttctactcctatccctgactccatctgcctgacaggagcatcacatggaagggtgtggacacaccaacctgcacatattcaagctttgttcatctcccatttttaccttccctagcaaacaacttgaaaggtgtgtattacatacctgttgctactgtaacaaattactacaccaccagtggcttgaaacaacacagatttattcttttttagtattggaaattagtcttacagaactaaaaccaagatgttggcattgctgtttccttccggaggctctaggtgagaatcccttttcttgcctttctcagcttctaacgctgcattcttggatcacggccccgttctccatctccaaagccagcagtgtagcatcttctctcctctttgccttctgtcttgctcttgtaaagaccccagtgattacatagagcctgtttggataatccaggataacctcctcatctcaaaatttttaacttcacatctacagagttccttttgccaaattaggtagcatttacaggttccagagattaggatgtggacatatgtgggggccatcattctgcctcccaaagggtgtgcctaccaatggacacttgagaggatgaacccaaggaagaagtgtgagtgagcactggagccacacttgggaacacgtaggcagggattctggtaatggaggagctgtgggatcatggtgagcctgtcctcttggctctcagaattctttgccctgcccagccagaggaagtccctctaaagctcaggacccagggcagggtcctttctcaggcagggacctcagcatggtacatctcctttctcctgctgatctggcgacctctgcctgattccctttctcttgatctatctacaagactgtcagaggaaagcatgttagcaaattgttttactctattaaaagttctttttctcttattttcatccctgccttttgcttgtcatgaaagagccccattccacacccactcattgtttttaaccatcctcactggctttcccttcctttgaatctctaattctagccttccgccacctcttcagtgttcttaaaatacacaagatttcgcctgcttgctgtgtttttttaaaaaatatgctatccagctagcaagttattcctgaatcctacaacgttgttaattcattcctcttatatttcttttttagttgtaaattttcctccaacatttgaagccagaagattttcttctataatcttaatttaaaatcactctacttggtctacttgtatactctgtctttatattttgctggatgttggccattttaaataatgtttccacacttatacaatgtatacagaagaatttttatttccaaaaaggtatctttaaaaaatgttttctccctgtagtcccagctactcgggaggctgaggcaggaggatcgcttgaacctgggaggcagaggttgcagtgagccaagattgcaccactgcactccagcctgggtgacagagcgagactccatctcaaaaaaaaaaaaatgttttctcctcttttaagtttttaaaaatctctgaacgctgatctgtgtttttacttattctcgttaatgcatggaaagcttaaggaatcatctatgtttaaggtctgacatggttttgagaccttatgaattatttcacaagaaggttttgtaggttttttccttaatgagacattacatattcctaaggctctgatgaaaagaaaatttgcccattcaaatttaattttaaactcatgttatacaatttcagtgattttaaaaatctatgcctataataatgttataatattaccatagtgtgtgctccattagggcgcatgtgtctgtcttgtttatcactgtagctccgtgatagcctagccaccagtggctgtattttagtaaataactgtgtaagtgaatgtgagaatgaatgatagaatttcaaaatggctttaaaaaacaatataaagatgttccatataaaccatgctgcctcagtcacaacactgaaatatagacttttacattttcttttttttttttttctttttttttgagatggagtctcactctgtcacccaggctggagtgcagtggcgcgatcttggctcactgtaatctccgcctcccggattcaagcaattctcctgcctcagcctcccgagtagctgggattacaggcatgtgccaccacgcctggttaatttttttgtatttttagtagagacagggtttcaccatattggccaggctggtctcgaactcctgaccttgtgatccacccacctcgacctcccaaagtgctgggattacaggcgtgagccaccacacccagccaagacttttacattttcaatcaaatttgtagtctctcctagcctattctgctatgagtagtaaattacttcactaagggtgctaactaaactctgtatattcaagataaccatggtctgtttaaatagtttatgaatgataaatgcagaagatattatatagatgttattttataaagatgctatatatagtgataattccatatgttatgaacttatacagatactgagataccaaatatgctaaagacactaagatttttttttttttttgagacagtctcactctgtcacccaggctggagtgcaatgacctgatctcagctcactgcaacctccgcttcccaagttcaagtgattttcctgcctcagcctcccgagtagctgggattacaggcatgcgccaccacgcccggctaatttttgtatttttagtagagatgcggtttcaccattgtccaggcaggtctcgaactcctgacctcatgatccacccgcctcagactcccaaagttctgggattacaggcatgagccactgagcctggccactaagatatcttttacgcagtgttagctgacgagaaatgtgactctctggtactgaaatgaagactttcctcattgctttaggaattgtgtatggggcttgattcactgcgattttgtctagctttataatgataaatatgtgtataatttattcagtatgaaagtattttacctatcttccctatgtcgaaggtttacttcctagtgttctctcttatacaaatgattgaaggtgtctttttttattgcttgtcctcagaatggctttactcctttatacatggctgcccaagagaatcacattgatgttgtaaaatatttgctggaaaatggagctaatcagagcactgctacagaggtaagactgtcagccctaaagccttgaattctttgatcttaatgtccatattctttatatcaggctgcaaatagtctccattactttgtctaaaatatgctaggaatgttcatgttactattataatcgcaacagtggctgtgaacaaatgactcaggcttgtgcacagagttccatcagtttatgccttcattttggattcgtgtctatttattcttacataaaatcatgcttccattaattttccatcctctgaccttttaggaggtttgtaccattctaaaattcaattacagtaaattctactcatctcttttcaccaatactttatctttgttaggatccaatataattccttaaaggaacaattttttttaccatcagaaataattcataagtatctgtgttagcacagtttcatgaggaatgtcattaaaaaaaaaccctgtaccttattgaagcacaaattatgacacatggttgtgtgactgattatggcaacaactgaatagaatgttcaaaatcagtctagttttaaagagttccaggacatctagacataagaagtgggagtgggcagggaccctgagaacatcagttttctttcctaagcatttcttattccattttctttgtattttccctctcatttttgcttaggcagattaaggagcaagttcaatgactgtctggggcagtgatttcaagtgatgctccagaagcccttgtgcttggggccactggaaggttgggagtgggcgacatggaagaggagaggaagagagctcccctgagacatgcctcttctcacctgtttcaaccagagtatatgggcttggcttttctgttttttttttttttttttttttttttttttttttttttttttttttgagacggagtctcgctctgtcgcccaggctggagtgcagtggcgggatctcggctcactgcaagctccgcctcccgggttcacgccattctcctgcctcagcctcccaagtagctgggactacaggcgcccgccactacgcccggctaatttttttgtatttttagtagagacggggtttcaccgttttagccgggatggtctcgatctcttgacctcgtgatccgcccgcctcggcctcccaaagtgctgggattacaggcgtgagccaccgcgcccggccttttcttatttcatattttgtggccccactgataaaatttcaaaactcctggcctgaagtgaaagatgactggtggattcttgttacccagaaactatcttaagataatttttaatgtctaatatggcttcctttctggacaattaagtcttgaggacatgaactcccttctatgctgcattagaaggagaggttattaaaatgtaataaatcattttccagtccctttgggagaaaactttttatggagccaattgcaacaagtttctgacagcttattctcgttagttaaaaaaaaaaatccaagaaatcactattaatgagaccatgtttcctacctatgactggaaaacacaactacccagtatgaaatgtttttgagttctctattcaatacacacagattttatactcttgtcacttggatatagtgtgatttttatgatttgggacctttttttccctcagacactagttctgtccatgattaccatgggaatatcttcaggcagagctcaggtaacaatatgagactgcatctttgcatcagggcctctgagaaatatatcaaaataaggacatctatatttgttttatttgattttgatttccttgaaagcagaatcatttaccagatgaaacctttatgctagagtgcttctatttaccaaatagacttaaggtttctagtgtaggatttaggagaactcagctcgctggcattcccagctgtctcatggctcctggctcttttggtcaaggccactgtagcatttcccatttggttccaaaaatacccttttatgtacattgcagcagtagaggccatgttacactctgatccccagaaagttaaaatcctctctgatttcacaaggaaatgtgtcttttgcaaataaatcatgtgaggttttaaattctagcttagacacattatatacctattatttgtttcattttagacaatcatttaaataattaaaattacttttttccgattgaatatataagcttaattgattaaactctcaatgcctgcactaatggttatcaaaaaacacacatggacaaatctttacatattcctttttcgtgcatcattctgtaaaaaaaaaataatgtttttacagggctgtgtggttgattgccatttgatatcctgtgttatactgctaaataccttctacagtcttatgtgcccatgtgtcaatatgcctaaagaagggacttgccctgagctgtttggtagctaatttgcaaaaattaatgactaatcaagacattatgatcactttaaagttcaataattgtgagattattcaatgtggcaatgaaattcatgattgagaagaaatatttgaagtttttaaatttcccataattatggcacttagcattggtaaataaatgatgaaaaatgaagctaccaaactttaatatggatttccttttaattgaggcacttgaacaaatcattccaaatgtttagccttgtcccatgcagtacagattagaatgaaatctacgtggtgaagatccgaggttaaatactaagaagggagttctcagtctctccagtaccatttttatacagtatttctctactctcttccttcttcctaaatattaccaaaattaaaggccaaaaactttttaatgacattctgttctgtgagcaaatgcctcatctctaagaaaaagattaatttcacactcttttaatataaactatcacagtgctgcaggaggtaatacatttaaatatgtatgtgctaatgagtctgtgcttttctcattcacagagcatttaatttgtgccaaacaaagttctaaattcaggctactatttttcatcttaagatactacatgctttactcttccattctgttaagtaatgtgttgtgtttaaaattcagttattattaaaaaaacgattattattgctggtactgcacattgatacaatacacttgaggaaaattattttttcctcagaagtctgcagtgactttaaaaaaattattttcggaaaaaaatggagtagttaaattgtggtaaattaccatcgtctctagaatgcagtcctgggttcaagcaattctcctgcctcagcctcccaagtagctgggattacaggtgcacgccaccacattcatctaattttttctttgttatttttagaggagatgggttttcaccatgttggccaggctcatgtcgaactcctgaacctcaggtgatctacctgcctcagcctcccaaagtgctgggattacagatgtgagccaccgtgcctggcctagaatgcagtctttcttttttttgagatggagtcttgtgctgtcacccaggctggagtgcagtggcacgatcttggctcactgcaagctctgcctcccgggttcacgccattctcctgcctcagcctcccgagtagctgggactacaggcgcctgccaccacgcccggctaatttttgtgtttttagtagagactgggtttcactgttagccaggatggtcttgatctcctgacctcatgatctgcccgcctcggcctcccaaagtgctgggattacaggtgtgagccaccgtgcctggccccagtctttcaatttaccattctattgcccatatttttttctctatggaaatggaaacttctaactttgagacttgttttccaacttttgtggattaaggatgttttttttttctttcacgtaagtagagcctaaaatatattattttttaatgtacttgtcacctttccaggaactgaattcttgtttctagaaagaaaaagatagctttccaagttttctagcatgattatctaagttttctctaccttttcacttcccatgctgttttttaagctgtctttttaagtttagaattgaaaaacaggtttttctacattacctagcacatgtaattttatatctcaatggtcaaaataatataaaattcaactattaagagcataattaataagttatcctaatttgccagagttttagatcatattgttccctaaacttccaaaattgaactggtaatagacaactccatccccaggggctgttttccctaaccattcagatatatttaataacctgcatagtcaatcatatattttatttccctgtctcagtcaccatatctttgattcccagtcagacttggtctccattctttctacccttcccacttttctgctttacctacagaggcattatttaggattggttctcacttttatttttcgattgcaaccatacatttgagcacatcctgtatgtaatatgtttgttaaggaatgcggatgtttttcaaaatgtatagaatagaaattaggaaagccgtctgattaaactattccataatatgatggataactggttataatctgcttctaatcttcccagtaatattttattcttttggttgtcaatcttgatcattaaagattagaggcatcattgcttagaactaaatctctagcatctgaagatgttaacagacaatttttaccttccattttaccaggatggctttactcctctagctgtggcactccagcaaggacacaaccaggcggtggccatcctcttggagaatgacaccaaagggaaagtgaggctgccagctctgcatattgccgctaggaaagacgacaccaaatctgccgcacttctgcttcagaatgaccacaatgctgacgtacaatccaaggtacttaaagctgaacacatttgtggaaaggaactctttggctgccagactcctcctgggggatgataaagaagtaggccatggtgataatgcaaaattatttctggtcataaaaagagataaatgactttcagaggtatttcagaaagaaggggaccatctaaaaaaattaaatgcaagataattttctttaaaagatgaggttgagctttttagaaatctgctttcttattctgtttatagtcacaaataatagaatttaaaagataaaattgtattgtgtggtgcttggggatgtcttcttccagtagaatgcattttgccatgttggaacagtatacccaattgcagcgagcagattgactgtttccataattttgcattgtgtaatatcttccctctttcttccaaacaacactgcttcagatgatggtgaataggacaactgaggtacagtattgtggttataccaaaatttaccttgtctttatttttagtttttgcccaattggaataaatgctcactaattcatactaatgattagaagtttgattaatgggaaattaatttgaaaaccttccccataatgaaggcaaactgataattcaaagatatttagtgtaacatatatttgaagcattatttttatcagtaaaactatttaaataagttattagagaatgaaatgaaactctttcttaacatatattttaatgagtgagatttactattaacttattgtcaagaagagatatgattttatttccttaatgagaattcttaggttagagttttaaggaagtgaaaatttgggaggtttctctgccactgagttttgtctttttatctaattgctgttgccctttttttttctgtatgctctttttctttaccacatttatataataaatgatgttattgagcatatcaagagcagaccaattgctttttcttgtaagtcttaaaatacttgtcatggaattgtatattttccacattccaaagtaagtcacatcaatcaataagaacattaagttcagaagcctctcagtatggtgtgtttgtatatgtatgtatttagtagtctctccttggccattgctacagagagagacactaacacgaacattgttgatgtatattatacaaactaacctatactcaaaaacaagtgactttttatgtaggtccattattgttttgctgaggggattctttagactatcatctcgcttgatgactaggttgtggacttttgagcattctcacagggtatacttgaattatttgtgttatttcttttgttccctatcgttgcatggaacctaggtcagagacaacggaaagcccaactgcttggtgaacttgttcacaactggaaccgtacaaattgatatcttaataactaatttcaatacctttaatttcttagatgctttttggtgattatttaagatacatttttgaaagcagtattggctctaaacattgtgaaagcagaagtttgggtggatttttactgagttataaatatttgcttgaagacaatagagtaaaaagaagagaaaccccttcgtctaatcctgtagaaatgtgaactctgcctcctacttccatgttaatcagggaagcgttcctctgaagggctgataccagttttgtgctgatccaagattgacagcttggttatcattatgaatgatcagtgaggctgtatcagacaataagtttatttttgcaaatgatattactatatttaaatactttgaaaatgatccacccaccctcaatatgtttttctgaaactaaattgtaacatcagtaatagacacacactcagggtatgtctgtgtgacaggaaatatcaagataaacatgaaataaatttagtcaattatttcctaaaatatgaaaatttgacattttataaaataacagccaggttgagggctgattttcccctccattttgacatgaatattggcattatgtaaatgcaaaataaaaatatcttgatcatagataggggatttggattaatagtaactgttcttattttgtgtcttgcttctctctaagtaagaaattatttgtatctaatgttgctacagtaagagcacaaattttcattacctaaggtatctgagtgcttatttagggtgtttttaaaacaaagccaccaaagcctatagatcaactcaatagaaaaaaagttgtaattttgaaaatatttcttaaaaacaatacagtaaacatcgtagttcatttcaagtaaaagagagcaataccaagtaacccaaaaactgcaggatgtgatagccaaataacagtttctatttttcccataatcttttgttaagtagtgaaaattctggagagtaagaaaaattattagatctttgtgtactttaataagaaaagagttaacatgcttctattgcaaagatggcaacaattttcaactagattttcatcagaaaaagaaagaaaaggaaatatatttttttcatttgataatttcagacttattttttaaacattttgagagtaaacagttctgtaatgcccatatagttgatttaacctggttggttaaattacactttattgtattgataaaatttgtttaacattcaaaattggagtgagctgaacttttttcttccttttatattcctattgatgccacgtatattgtttaatttttgttttttaattatttcatcatgacaacaacataatcgtgctacacagttgtaaaagggtataggaatatcatgacagtgtaaatgatgtggaacaaattctatatctttgtaagaatttttcaacatattttcatgcttccaaaagtataatgtcaacaaatactgcttttttaaaacaaaaataaaacaaaaacactggtttctttgaatcttctctgaaaagacattaaaaaattcattgatatgttaatcctatggctgaaacctgatgttgtttaaacatattctggttttcttcaatatgcaaaaccaacttaagaaacattgttttgtataaacaacaaatctcataaatagataaatatttaagataattaaaaatatgccatgaatattatgccaataaatgtagaatatttatttactttttatatgtttagttatgtaccaccttataacattaagatttaagatcttactaaagcatttattattgcttatatattaggtagacttttaccatgtgaccttcttcactaatacaatggctgcaacatagaaaagtgaagcgctatactgactgtcatatctttgctttcatagagtggttttacccctttgcacatagctgcacattacggaaatgtcaacgtggcaactcttcttctaaaccggggagctgctgtggacttcacagccagggtatggattgaaatagtttctcattctagatagcagtaaatgaatattttaataaagtaaaaaggaacaccaatggctttcttaaagattttacttctttttccttacctgggtctgtgctggagatactagatttttcatttcctttctttaaatcacaagaagtcatcttggcttaagcagaaaataagaatgttgtaaactcatgcaaaaattatttccaatagttaaggatgacattcattctgaccagtatgaacagttatatttaacgatcatgccatgaatcctgataagtcacgtcaaaaaattattaaactgttaaaatgttaactataaaatatataagtagcatgtcttatgatgactgtagggcacacaatttgatagggaattgtttttaatgaattgagaatttgttcacatgaagtcttactaaaatacataaaaggtgtcacattgttacatgtttcatggtatgctgttattagaaagaattcacttacatgataatggtatatatcagtatacttaatatacagttaatgcagaatatgaatatacaaaaattacaacagacaaaaaatcaggtacatatccttgccataatgatgatatgtgatagccaataaaataaataaatataatttgtatgtataatgtttttgtactaagaagtcatctgcactgaaactatgttgtgttattttcaagctgtttttcttactgaattattctgaaggagacgtttgtttgttgttgttgctgtttagagacagggtctggctctgttgcccagggtggagtgcaggggcatgatcatggctcaccgaagccctgaactcatgggctcaagcaatcctcctggctcagcctcctgagtagctaggactacaggaacacactaccatgcctggctaattttttaaaattttttgtagcgatgaggtcttactatattgcccaggctggtcttgaattcctggcttcaagcaatcctcccacctcaacttcccaaagtgctggaattacagacatgagccaccatgcccaacttgaaggagatgtttttaagaatcatttttatattggatattaatacccaaatatttgtattctgtttttaagaatcataaaacttaagatgccagactctttaagtgcatggatgttatagaaagaaagactttacactagggccctatcttaggtagatttaaaatttttgtttctattacagtaaagtggtccctttgtctcttgactataacttgtacattcaatacatattttgtagttattgactaacttagttatgcagtttcattccatttttcattctctaactatattgttttgtggtttgtgtgatttttgttccttaaaaatcaaagacatagaaagagtagaaactgtggatcaaattaccacgtaggtcacaacttcctttgtggcctttaacacaaaggcatcgccatcatgccctgtcatacccaacagctcttgtttggtctttctgtggtgtagaatggaatcactcctctgcatgtggcttccaaaagaggaaatacaaacatggtgaagctcttactggatcgaggcggtcagatcgatgccaaaactagggtgagtgtctctgttctttcaattttctaccattattatttctttcaagcctcatagaaggcacctcaagacaccaggtcattaacataagcaatgtgttttcaaggaaattgctttattggaattgatttaaatctcatacaacatttaaagggttcataccgtacagtgaaattaatatttgctcataagtgcccagagaagcaaaatgttggtccctcaatgagatagtttttcaagttttggcttagtgattttctgggaccaaagatcaaagattaggcttacacaactctcttttgggtagttataagtatcaagaacccaaactaattaccatacattaagattgagaatgtggcttttacacaaaatattttagtacatgtttacaatcttttgcttctaagtattcaattcctaattcatttttcttaagcagctatgctatactgacctgagcaggggatttgctattatggagaaaagcatacagttagtatactatacctttatgtcattttggtagaagtgatagctttcatttgtttcaaacttaagtaaaatgtcatttcaagtttgcagtacaccccaaatagataacacaatagacagtagagttcagttgttaaaagtgcagaataaaggcaaactgcctgatttcaaatcctatttttactattaataagttgtattatattggcagtttacttaccttctctgaacttaggctaataataacacacctacttcataaagttgtgtgagaattaactcttaggtatattatttaccatttttgaaaaagcagagtaaattacctagctcttcataatatttgataatattactgacgttatataatatgtagttatttgctgaaacatgtaaggattatttcagtattaattatctggagtagatttggttaatcatagacttcagcaaaacttcaaatgtgcctataatacaaaaatgttaatatgtggtataaaagtctatgttaatatgtggtgtaaaaagcctatgaaagatgataaatagaatatgtctcttatggtattttacttcactttgtttaattctgagacttcatgttttcatagtcccagcagtaaagatcaaatctagtttccttgcaaatctgggggctagcaaacacttttgtttaataaactttatcatctgtaagcttccagaatctataccagtcccagactataaattatggtttttaatgacctcaggaaaccttgctttcttaatctcacttctctaaaacttttggtccagagtggctacatcacaacacgtgggagttctggagaggtttgcgttctgtcaaatctttgctgtggtgtccagtgtctttgcatcagagttttatatggtttctactttttgcttagtaggcatgcctttttccttaccatactgtgagtatacagaatttggaacagtatgcgttatgttgcatggtttgcttacttattctttctatttaaaggaatgagttttgcacattactacattactaacatcattactaacattaccaatgtattacattacaaacatactttactaacataatttcttcctatatactgcctttatgagattaccactggaaagaaagcattttggaaatgcaaaaaaatttttatcttggccaatgtcttaaggatgcacattgcttttattaatgctttttggagtattaactcattattaagatagttgactttgttcttattaatcaacagtatttacttaataaaagtactctaatttgtgtggcttacatatatttgggtatacaattaaaaagtctaactccaaatagacagtgtatcttcataaaaagagtactaagaaatgaagagaaatggattcttatactagttctgtcatagtgcagcctttagatacagcaaataaattaaatttcattcaaggatttaaaaagaataaaataggttttctaactgtatacattgtataaacattccattcatttattccttaaacaaataactattgagttcctacttggtgctgtgaaccctgaagatacgacagttaacaagacagagtaggtttctagactcatagagatgcaagtcagtagttcaaggaattaagttaacagtcttcttgtaaaagtttaataataggttcttaaaaaacaaaaaaacaaaaaacaaacaaaacccttgatttgtagcattacctttgctggtttccatggtgtaaatacttctacagtggtcagtttagagctagcaacttggtatcactaaatgtagaattgggaagaggtgtgcaaaaagtggctctccttatttcatatgagctggttccagcacaccccaggattagctacaatattgaatggttgcactgaacatttttatttttattatactttaagttctggggtgcatatgcagaacatacaggtttgttacacaggtattcacgtgccatggtggtttgctgcacccatcaacctgtcatctacaataggtatttctcctaatgctatccctctcctacacccgtcccccaacaggccccagtgtgcgatgttcccctccctgtgtccatgtgttctcattgttcaactcccacctatgatcgagaccatgtggggtttgattttctgttcttgtgttagtttgctgagaatgatggtttccagcttcatccatgtccctgcaaaggacatgaactcatccttttttatggctgcatagtattccatggtgtatacgtgccacattttctttatccagtctatcattgatgggcatttggcttggttctaagtttttgctatgtgaatagggttgcattgatcttttttagcactaaactttccccccataagttgaaatacttcttcatctgtaagtagaaggattttaaaagcattgttgggttcttttcattctggctacagctaacagacctatatccctcttactaaagacaaaatcaagtaggaggtaaatactgaaatcaaggactgtgggctggaattgggaggccaattctggaactataatatttgattactaaaataaatgaatatgttttgctttttcttttgcttttgaaatgtattcaaaaatagaaaaatgtttatattaattagttctcatgctgctatgaagaactgcccgagattgggtaatttataaaggaaagaagtttaattgactcacagttctgcagggctggggaggcatcaggaaacttacaatcatggcagaagcagaaacaaacacatccttcttcaaatggtggcaggagagagaaataagtgcccagtgaagggggcagccccttataaaaccatcagatctcatgagaactaactcactgtcacaaaaatagcatgagggtaaccaccccgttattcaattacctcccactgggtccctcccatgacacatagggattacgggaaatagaattcaagatgagatttaggtggtgacgcctaaatcaaaacattgataaactatatcaatgtttaatttggttttgactatatttttagagaatataataaagcttctacatatgaaaatttttttttttttgagacggagttttcactcttgtcacccaggctggagtacaatagtgcgatctcggctcaccgcaacccccacctcactggttcaagcaattctcctacctcagcctcccaagtagctggaattacaggcatgtgcctggttaattttgtatttttaatagagacagggtttctccatgttggtcaggctggtctcaaactcctgacctcaggtgatctgcccgccttggcctcccaaagtgctgggattacaggcgtgagccaccacacccggccggaatgtttttaaagtattatgttttcattttgttgttgttgttgttgttgacatctcaatttcccccagcatttaaattaaccacaaatattctgaatttagtatattctgtcaaggatcttgccttgatcttctcattattttttctcattcataaggtttttattatctagagaatagcaagatctagagaggctttcagataattaagaaacaaatattacccacagttatttcttggctctcatcaccattttggcaatcattgaggcattttccatcttgttggcattctcatcattgactactatctaatgtgaaactctaagacatttgcaccagagccttttactggtatctgaaagacctcatttcaatgtgaaaacgtaaattttatagctagtgaaaatgaaattataaatttaggctttattaagggcattattctttttttgtttttaagcttatttattatttaaatgtggtgataccgcatattaggattatgtttaaaatattaaaaaacatatttcaaagcaaacaataaaaagtgtacaaaaacattaaaggatgatgaacaaaaaacacacagggaaaaggaatcacccttcttacttgttattaggtataataattaaagcagtaacaataatggttttcaattgtcatatgcatatgttgttctaggcaccctgctaagtactctacaaatatcatcttattttatcttcctaacaacttatgaagtgtgtattattttcttgttgagaatatatggaggtcttcatttgagaaatgagactaccaaagggagaaattagtttcagcagaattatgtaacttgacctaggacacagaactttgtaatcagcagagcctacccatgtattcacacaaacttcagaatacattgttgaaagaatgacctaagcagagaggggggaagatatgaaaagataaagaaactacataagtggcatccctccaatgttgattgatctacctttatgaaaattatccacatcatggtgtatagtacatccgtgtgatgaactgattctagagaaaaaaaaaaaaacaacaacagagaaaacacaaggggtctctggaagggggaaaaacccataacctgcaactacaaacttaagaatttaagtaaaaagattttagaatacaaaagcttgaaaagaatttttttggggcattaactttataatgtgctttgcagaaaatattcaaaatctaatcaaattgagcctgttgggtaacttgaatttgatgtcatcattcacacatcttataagcacagacaccttgcatcattaaatgtaggatttagaactaatttaatccttattgttccttgatgttcttgtgggtatattaaatgttctccataaagctcctgttgttactctgagagtattttggatgtttcaacatgattacacaaagactatttcatgcaatttgcagaaagcaatactctgccttttctaaaaaacatgtaaggtgccattccctccttcatctttcaaacaaggcttgcaagttaaatagggtgagaaacatcatctccactctatgtatcacgaagctcagccttagagagattcatccatggtgaccgatttgagattcactgcagggttccatggttccgaagtccacacactgaactgttacatatgatgtctctgttcaccatgtgggatttctcaaaccctaggtctccacaaagccctcaccaagaatacgtttgagaaaccatgctatatctaattgttaggtaagttatgtagcaactaatgctctgtagttccaccacagggtgcttttatcaggatacaaaagtgtaatcattgtcatcactttgctggaacaactctttaaggctcctatctggcaaattttaaaataatgtagcatttcaactacactagctaaatactttttttctgagaaggcaatcttttcatgctaattcttaggtacccaaaactgcaaaatctgttttggttattcaatatcttcgtactagctaaatggatttcacaaagcaaagaatcattatcagtcaaggtcctagccaaaaacagaggcccaaatttgatcatttgattagagattattgaagggtctatttataatattgtgtagtctgtaggaaagagacaagggacaagggacagtgtagaatcccaggggctagtaacagcgggactcaataccagtgctcaacctaaaaagtgagaagtacaggagacccccagaacttcaaaggagagaattgtgtggaaaggctgctttggcaggaaggtaaactttcgtaaagacacacagccggatttgggaggtctctcgaagtccttttcatgtcttgctgcattggccaaacccagctggaagccagaggacaaggcagctcactgatgccccctacagtggccagtctgttgggacacagagcagggaggagaagggtagagcatgggtctggaggggcaaacagaagacatctagcatagaaatctccgtgttgagtcagagtgttgcgattcagaggaattatttttatttggagtaaagcataacctggagagatggtcctggaagtagagacacaaacgagaggccatttgagttctggataaatcagaaactgctgaaatcttcttaattgctcaccatccattctctgtgatttatccaccttctccacctctgtccttgggacaatctttttttctttttccttccacctcaaatcaccagtaaatttaagcactcagtatttcattttctctctcacttcttgctcactgttaattacatttcgcctcacatttcccacccactctgctttttgcccatgccaccctaaagagaaataaaatataaaagacagagggcacttggggattgctctggaatcagaggctatcccagaagtgtaaagatcagaaagttttataagtaatatagcatacagttctgccatattttatttgatggagttagggttctatttattaataataaagttcatctttgggaagcaattatgtgatttctaaaatgttgaaatatatgtgtgaaaatctttaaaatagtctaaaaaatgatgcttcacttttgcaagcattaggaagcattttagaatttatgaaagtgatgacaattcaaaagagaacatatgtgaaaaaattacgctaagaaaaatttttaggtaaaagtatattagaacaaacaatatgaagacagtataacctaatataatccctgttttcggttccagggagtagagctttaaatttcaacaaatgccacatactgtgctttcccatcttcttgaatacgcagacacatgaccagaagccaatttcattccattgaccctctgtccacacaggggatctctcttgctttctccctgtctctgttttgtttgtctttccctttctctttcttgttctctgtgaagatgtacttctgacttgttttctctttcactcatctttctggttatttaacaaattgcagttctattacttatttattgagtaatcaggattgagtttaggaactccctctttatggttgcaatagatgaaatatagatttttttgaagtgaacttgggcctaattctttaattcttttggcaggatgggttgacaccacttcactgtgctgcacgaagtgggcatgaccaagtggtggaacttctgttggaacggggtgcccccttgctggcaaggactaaggtgagtcattatgagtaagatggggtcctaagaaatctttaagttacttgatgtattatctctattcttttttaaattgaaacatcaggcaagcattttctagttctttaataattgtgtgctaggaataggaatatgtatcaaaccacttaaaattattaaaataaacagatatatgaattaagatgtattaaatgtgtgccttcaagtttttgtctatatttttacctgttattcttactgcagatggaaatctgaatacatctgtattttaaatataaatgagaatatctcttagatgctgagtctagatttttatgattctctcagatgactatgaaacatatataaaattatcttttaaagcagaacaattagcaacacaaaatgaatctttttgctcatccaatctttatctcttaggcaatactaataaaaagtaattactcaacagtggcattggttgattatgttgaagattagtagaggtgatttggaaagtacaagttgcaataggccacctacaaagaactattaagcaagcatattttctttatgacatactacatctagccctttttcctcccgttttatcaatatgctcaaatatgggagaagcacttttccatatacatgagcaccacactgtgagttggtttgctgaagatttttcattatcaaatgtattttaaatgcttttattattgtatagttctctattatccaaccctacattgggttatcagaaaatattttgagacacgaattggagatactcatacagagctgattaatgtgatatgcagcaaccttggatccttaaatacaacacaaagttagacaaagggcagttgttgtattttctccctattccattccacctcataccaccgcccccccccccgacagagttggtatcaactaatgctattactagggtaagctgaagaaactaaggcaattgacacaaacaaatatttttcaatttatatataattgaaatcatttgaaacaaaactagcccatatgtttaagatatgtgtagaatgaactcaatttgtaaaggtgtgcccacatgccataaaagagtggcttcaaatcagtaatatatgaagaagagaaataattatccgcgttacttttattctcatacctatactgtgaatgttgtatagatctgtctttaaaatgcaacaatttgggctgggtaatgcagagataattatgtaaagttttgataaagaaacgttgaaatttaaatggaaataacaaaatttcagaccaatcatgttacagccaatacaaaaaccaatatgaagttgaaaataggcagatatgctttacaaaccgtaaaataatcttatctgcagagtttgcttgtaattgtcatgtcactaatgaagatggcaggttacctggatggaatttttttaatgtccttcctgtaaaatcaagtatcattcaaatgtaaggatcctgcataaagtgtctctgagtgtacaattatgttcatgtattcatgcatccaactattatataatattgagtagatacaatttgccaggcaagtgttctagtcactaaggcaccatcaagatgaataatacaaaatctttttttttttttttttttttttttgagatgcagtctcgctctgtcgcccaggctggagtgcagtggcacgatctcggctcactgcaagctctgcctcctgggttcacaccattctcttgcctcagcctcccgagtagctggaactacaggcgcccaccaccacgcccagctaattttttgtatttttaggagagacggggtttcaccgtgttagccaggatggtcttgatctcctgaccttgtgatctgcccatctcggcctcccaaagtgctgggattacaagcatgagccaccacgcctggccataatacacaatctatagctgcaagaagctcagaaattagtgggcatgatagaaaaaaaaagataattataaaaaatagagatatgtatagggtaataaacacagagaagatgaattaatcaggttagagtgaggggataccgctctcctgggagtggaataggtacctaatgctagactattctccctccccttctgtattagtccgtttcacgctactgataaagacatacttgagatgagactgggcaatttacaaagaagtttaatggattcacagttccacctgaggaggaactcacagtcacgaggctgaggaggcttcacaatcatggcagaaggtgaaaggcacgtctcacatggtggcagacaagagaagaaaatgaaaacccagtgaaagggctttccccttataaaaccatcagatcttgtgagacttattcactaccacgagaatagtttgggggaatccgccctcctgattcagttatctcccactgggtccctctcgcaacacaagggaattatgggagctgcaattcaagatgagatttgggtggggacacagccaaaccatattaccttccataaaaactcctaggtttaaatcacccattctttcttctgaagcaactatctaagtgtcaccccctcattctttgtcaattctagctctcagcaaactgtgactcctcaccacaaccccttcttattcttgctgactttaatgatcttgattagagcagtagataattcttctagttggcctctcagttaggtaactctaaaccctctatctatttctgtgtctaacttcacacttgccagcccctcctatgtttcagctcactctcttcagaaccccaattccgaaattcttttattctgctgggtccttcagtcatagtttcactcttcctcattcacatcatgcccttacctctgcccagcacaaatttcatagtcatttatgctactcccttacgtattcatactacctgcatttcactcaattaaattcaactcacattcatgcaatcaaatgtggctacaggaaacacccagccacactaactgtgctcattttagattcatgatcactaacctcaagtcagctggtaatgctgcctgacaatctcgctctatcttctaagtctattcactctcgatccctgctatctgaccattctatattttcttcaaacttatgtagacttctttccttgtcttcatttcccataacactgagagaattcaagcaattggaagataatttccagagactcccacctccatatctatccatatctatccagtgacatgacttggagcccatgtagtctacattctctcccgttactatcatctggtgtgattgcttggtcctgtcttctcaaaacactttctttatttactttctgggacattacattcttctgactttccttctgttttcctagctgccacttctcagtctcctttactagttcctcctcatctctcaggtctctgaatgttagaacctccagagctcagtctttgtatcttttctctatcggcactcacttactatgaaatctcatgcagttctatctttaagtagtacctgtatgctggtgccacgagtgtacatctccagaattccgtatgtagatgtcagctccccattgccacttggatgtctcctgggcatctcaaatttagtaagctcaaaattaagcactggatataacacccacccctcaacctaatcttcctgttatccttcttatctcaacaaatggccatctaattttttttagtttctcaggccaaatacccatgtcatgttggactcttctttttctcactttccacattctgtcaccaaacactgtcacctcttccttcaaaatgtgtcactaattcagcagcttgccaacaatctcattactaccactctggtccagatcaccatcaaccctacctggaggactgcaagaggcccctaattgacttcccttcttttgcattctgtccatatggtctattctcagcacagcagcaagagtaatcctgttgccctaaaccttccaacagcaccccatgtctctctgagtaaaagtcaaacctgcaaggtctctcacctctttgaattcctccccttatccatcctcctcaatcacttgccttaaaccacattcttctccttacgattattgatatcgatcatgcccgttataatcccaacacaatatatttgcacttgccttttctaagcctcaggtgtttttcccccaagtcaacaagactagctctcttacttccttcacgtcaaaactcatcttctcagtgaggccatttctggacatcctatcaaaattgcactcacgtacacaaactccctaggccattcggtgtttttgttttctcctttccattgatggccatccaatatactatatactttaattcttattgtttttaaattgtatgtctgtcttccacactagaatgtaacctcgatagagacgggggtttcctgtctgttgtgttccctgctgtatccacagtacttgaacagggcttgagtaggtgctaagtaaatatgcgtaaaatcaacaaaagattagatgatgaatattttattttccacgtaaataaccttcaaataggtaaaacagcatcaatgaatgttaatttttcaaagaaacatgcaacactccagtccaaacgtcatcaagccttgaatttcttctacactttgcaattatcttcccctcaatgcataaatacttctcatcagcctgttgctgttttctaaacttatttaatgaacttctaaacatgaaagtaataattatgaatgaagattatttcaaaatatatgaataatttataagtcacatatactctaccacaattaagaattaatgtatttgtttttgttgtccctcactgttgaaatcaccttccttgttgagaatattgggcggggggccttttctggtaaaatatccagatacaatttctgctttgttgaatgtaatgactgtcaaactggatacttggcgaacaatcctttttctagtggccatatttgcattggtattaataaaagacaatagtcccatctctttaataggcaaattgttttttaaaatttagttttttcctaagtttacatattgtttcctgaaagtttatttatttagctttaaaaaaaatgagagtcttaccgagtctgatgaacagtgcattaccctgctttcttgtgttcctgctgttgaccttactctagaattaaggctaaagctgttttggtccatattaatgaagacaaatttagattatcctcaactgtaaaagttgtgaggtcattggcacatggcctacatttgcctcacactcttctagcccttacctacctgttttctccaagtccaattcaagtagtctcctaatactataggtaaaaggaattgtaaaatttcagaggaacatggatctaaaagatggtcaaagtttccatacctccctgacctgcccacttgcttctcattcacccacttccctctgtatttataagaaatgcaggcagagagattaagtgaatgcagactgctatgcatggagttggatacaaataactgaagcattaggtattatttatttttctgtatttaatattgccctaataactgtaaaatcaggctaaattgccacacataccatgcatgacagacatactaatttgcatttttgtctatggtagcataattatgaaattaaattatctcttagtgttcatctctgcgaaatatagtctgctgtatattctgatgtcaaatggaaattattttttcccctgccactaactgtgttagagatcaagaatcaactttgctgtactttggaacctgaaaataatgaaaaaaaaaaaggacattattttgttttcttttaatgtgcagaatgggctgtctccactacacatggctgcccagggagaccacgtggaatgtgtgaagcacctgttacagcacaaggcacctgttgatgatgtcaccctagactacctgacagccctccacgttgctgcgcactgtggccactaccgtgtaaccaaactccttttagacaagagagccaatccgaacgccagagccctggtaaacttggcccagtccacattaactgaatacagattgagacaaacaaacccacattcattgaccaacatgcatacaccagcaatgcaaggttacagatatgtagttaatcctgctaaatttgtcatccttcacaatcagcctgtgtacttcatacattcatagtttgttagcaaatgctggtgagcaaagatgtatttaagagaacaccaatgtaacatttctgaaactagtgagttgcaaacagatagatatgaaacctttggagtgataagcagttttaaatggaaaatagaagttgaaaaataggaaattacaaaataaattctagatacctctagataaagttagaacacgagtatgaaaagttgaatttattaatctctttttggaaaaaaaattaatggtgaatatatttgactatgtaagggggtataaaatgtaagtctatgcagagttcaattgaaaattttcattgttgacttgattactcaaccataggctaatagaaaagttatgcctagtgtgttacggcttcagggagcattttatatacaccatttcaggaactgctcaagagaaaactgcaagaggctgtccctagagcagctttatgtctccccagttctgatattgaataagtcttccttgcttcacttattttctaacaataatcattggaagtattagacatgtactaatttatgcctcttgtgtcctaattcccaaactaaaagtaaatcctttttttctatgtgtttacatggtttgtgtctgttaaaattggtcttcaaacaatcagtatttaagctgagagaccatcattagaatcatcaaatattaaatatgatttttacaagaatttttccattggaatcaatttattgataattacgtgggaagtgaatatattttccagattatatgtaattatgtgaaaacattcattttgtctagggagtcaaaaacattaatttttaattggatagtggtcaataagcttataaaatatcacagcctgttaattgcaaatattttaagtgctgcatgtgcatgtggctatttatatctggcatgttgtatagctcataaacaggggaaatgacctaaccaattaattatgtttatcactctattgtgaaaaataagaagtcatcagcttaagtaagaccatatgctttcctgagaactgctagtgtgtaaaaacgttgactgatgattggtccatgttgggacatgcgaaattgttagctggcagaatagacataacaaaggaacattgttgaaataaaaaaaatatataatacacgatgagtaagcaccgggccatttaacatattttacttaatttgccccaattcctgggcattagcctagttcgccaagttagaaagtacctgacagacttcttctccacatttctttaccccagagctacctccttgcatttatcccagaaattctccatacatttcttgaaaatattcgagaacttaacagtcatttctttatacaataaaatttatctcattggcatatatgttataaaaatgatataaaaatatagcttctgtatgtaaaaatgatcaacataatgatttctgctgactagaaatatgccctttataaagaaagtcgtagcaaagttgaaatatttcttacaaaggcagtatattcttagattttttaagtagatgaataattcttatgctctgagaaatggcccttcagaagaatatatgcttatcttcagttcatcttcaagtaatttaataaccaggacaatcaatataccttaaaacatcttagaacttctaaaatgtaattgcttctctgtttttctttctttaaagagaaggaccatgtatttttcttcacttttgttttccctgtaaccacacaaacagaattacgtacaggcccaccacacataagtgaagttcagtgcctacaggaacacatcaccatttttctttccaaattccaacacctgcagggattgaagaaatggtaacattatgtgacgatgtaacattattgcctgcaatgtgccagcatggagttgtgtgagaattgtttctgcatgttttcaactaacttgattgtcttttgcacagaatggttttactccactgcacattgcctgcaagaaaaaccgcatcaaagtcatggaactgctggtgaaatatggggcttcaatccaagctataacagaggtagaaaaatgttttagctagtcacaaagcattccttctcttactccttcctccctttcctttttctcatcttctgtcctcttcactcaagttttatttatctgaagaagccccaaagccccaccggtgcagaggagtaaaactgctgttgctttgtttcgcagtctggcctcacaccaatacatgtggctgccttcatgggccacttgaacattgtcctccttctgctgcagaacggagcctctccagatgtcactaacattgtgagtatggcttgggtcagaataaccccagggaggaagagcgagaggaacagagattgtgggtgtgtgtatgtgtgtttgcgtgtatgtcatcgaagtaagcaaccaagctttgagaagggcccttgtaataacacattattgaaataatcaccagaacttcactgaaaagaacctggatagggtaagaggtgttataaagtaaaatggaagctatgaagtgagacagcttaagactctgggtgtaggtggattgaacatgcatcttaaatgcatttattaaaacaaaatacattttaaaagctcctctgcaagtgaatggataattggttcgaatagaatctttagggctcaacctagttgcttgagggaattgtattccaggcaattttcacaaaaacatcaaatcattaccataattaaccttaacaaaagattaaccagagatagatcaatatcagagacttttacttcgtgtcaaactcttccttcttcaattacatggatttcccattttgtaacattacgttgatttttacttttgatttgatctgatttgctagagtggaggcttctcttagctgaaagttataccacatatcctggaatgaatgttggtctccagaccactttcattcaatcaacaagtactggatgtctcagaatttttctatgtaatctaaattaggattttcacttctaatttctttgtatatctctcattttcttggattttccccctttaaactttggtcattgtatcaggataaatcattgaatgcaaatgttctcctgagcaagagaacttctttgcacaaggtgcaggcatgtatttgaagttcaagaaggtctagtagagtattgagattcacatgtgcaccagaaataactctctcaaaataaataagcttattattaaaatgagctatgttgtcaaaagcaattgattggcacttgttgctaatttttggcatctcattccatttaagctgtgaaagagaatgtccagtttcactttttatttgtattctctctcatatttctttttttctgtatttcacacaccatttccacagtgaagtttctgatggctaggaaaatccattgtgagaattaattcaattgagtttaaaaattatttaatactctctcttcatgttattcagtaattggagcataaaatcattgaagaatttaaagtctatatttataagttttcttaattatagcttattggtcctaaggtcataatattatatgctaatctttatttactccattagacatgagagtaatttcacaatgtgccaacataagtttaatttctagtcacttcttagaactttaaaagtaatcatcatccccccccttttttttttgagatgactacctttttttttcttttttttttttttaattgagacctgaacagatttacgtacaggccagtaacattaaaacaaaaaacaaacaacaacaacagcaaccaacaaaagaaacaagcaaacaaacaaaaaaccgctgtgttcttgcccgccttttccttttttatctccacctattcttatttgcattccaatgcttataggatcagaggagcaatagtgacactgttacaatatgttatcacattataatgataacatgtacaagaatattctgtgggttgcttgattgcaatcccctgaattaatctcttttagtggagacttttacaaactcttcaaagaataatccatataaaatggttgtggaatttgtggccactcttactttgcttcttcactgaccaattccaaatcttcaggtggttatggagttataatatactcccttctattaaaaaagttatatggggtacatgtatattttcaaataaaaataaaatattaattgaaacaaacaattttgacatatttttcaggttgttgaagactttcaaatttgacaatcattatattaaacttcagcttccaactgttggtcatttaaagttcttcattttatctgttcatttgtccattatattatctttccatccagctccctcaaaacaaattcttgaggggcacatgccaatataatttccgtgttttctagttatgttttgtaaggtaggtccttcaggaagcagatacctattgatagggttgccaggtaaaatataggactctcagttaaatttaaatttcagatgaaaaataaatttttatatatgacccatgcaatagttaagacatagtaaaataattatttgttgtttgtctggaattaaaatttaactggctgtcctgtacttttaattgctaaatctggcaatcctacatttagaggaatttaactttctctagcagtgggatgcctgtgaagttgtgttttctcagaacatgaggatatagctactggatccaaaattctttgcaagttgatgaagaaaccgtgtgaacgctgactgcctgcttgctgtgtcagagttggtcacttcctgaccctaaaacaccccacccttggagcctttgtgtgttgcctgaaatcatgttgcatttttgaatgcaatgctgtttgttgtgcttcgatgcttttcaacttgatgcgcccaaagtggaagtcaatgtagccctgtcagcagagtcagttttaacaactgagaagagtggcatgaaatttagtacctgctttggacatgagcatacccattctcttgctagttttgtttttgcctgaaaattcactccaagtgtgaggtgtaccagtaactcaatcacgtatagacattttttttttaactgaaaatctccttttccagaaggtttattaatacgctttgaaacttagaatgccgaactgccaattacaacacatccataatccaaagtattcatcaataaccataggaatagaaaactaagcattttaacaactatcaagaaagaatgcaaggtcttacaaagttttatcttccttcccataagaaatcagtggactaatggtaaagttcacacattatattatgcttaaaaatttccccgaatccttaaatttcattagcttgagataagaaagacaaggctattaaataaaatagggtgcctgacaatcaagacatggaaattatttattacaacaatatatcctgattttcattttcttatttattcttatatataaacaatggtaatattaacataaaagactaataagggcaacttacagtagaagtccattatgccagaggtgttagataataattaaacaagaccattattataaagtggagagaccatgtgtgtgtttatacataacctttgtttgaatttaagccttagtgctttaaattagattctatatctaactcatcaatttcaagtgtgtaaaacccataaaaaaaacttaagtataaaataaaggttttagaaatattggccagtattggaaacatttcagattttgaaagccccttattgataaagcttggcttaaaaaataaacatgaaggccaagcgtggtggtggatgcctgtaatcccagctacttgggaggctgaggcaggagaatcacttgaaccaaagaggtggaggttgcaatgagcctagattgcaccactgcactccagcctggggtacagagtgaaactttgtctctacataaataaataaataataaacatgaaaatttgtcattacataggaattcctgggacctctttgacttttaacttcttatacagaaatttattcttatcatcatttctaccaaaattagtaaaattgctagccttttatcagacctagaaataacgtaaagatttgaggagtattgtttttgtttttctgagacacgaccttgccctgtcacctaagctggaatacagtgggcaagattatggctcactgcagcctcaacctcctaggcacaggctatcctcctgcctcagcctcccaagtagctggaactacaggcatgcaccactatgcctggctaatttatttatttatttatttagagaagagatcttgctatgtctcccaccctggtcttgaatgcttgacttcaagcaatactcctgccttggcctcccaaagtgctgggattacaggcttgagccactgcaactggtcttgttttgttttgtttgaataccatcggccctctgtatcagtagcttctgtatcagtgggttctaaatccatggatttaatcaatcttggattgaaaatatttgaaaaaataaaaataaaaaactacaataaaaataacaaaaaattttaaaaagtacagtataacaactatatagcatttacattgtgttaggtattataagtaatatagagctgaattatacaggattatgtgcataggttacttgcaaatactacaccattttatataaaggacttgagcatccatgtattttggtattggtgggggaaacaggaggcctgggaccaatccctcaccaatacagagggacaactgtagttagaagattttagccttgccgggcacggtggctcacacctgtaatcccagcactttgggaggccgaggcgggtggatcactaggtcaggagttcaagaccagcttgaccaacatgatgaaaccccatctctactaaaattacaaaaattagctgggcatggtggcgggcacctataatcccagctacttgggaggctgaggcaggagaatctattgaacccgggaggctgaggctgcagtgagccgagatcatgccactgcactccagcctgggaaacagagcaagactctgtctgaaaaaaaaaaaaaaaaaaaaagaagatcttagcctcatctatttagagacaggttttaaatgatatggaaaacaagttagaaatcatgattgtctgtccagggaggaaaaatcttgtgatacatctaaagtctgaagataaatattagcattccaatgatacatcgttttataaaacaacatactccagatacatttactttacaaaagtctaaatctgttatcagaaaataagcccattagaggataaatgagtcatcaacaaagaagagaaaattagagtagatatccaatttagtgctttcacaatcaaatcatttgacatgaatttctcataacttcaaaagaaatgggtctccaaaatactgagaaaaaattaactgtgaactatgtgccaaattaaagttcaccttaaagtttctagatttaagggtttgttgtacaaggaatcagaagaaattattctctgcagtttgtcaattaccacaaccaaatttaaaatcaaatttagtttatttggaatggtttactttacttggttgaaatcatccttatcttctagaacagttgtggtaaatcaatctgtaataatttttattccaatatcttattctaactgtaaaattacttgagtgaatgaaaccctgccttctttagaactatatatggttttaaaatatgctgatttttaaaaacctctctcttagagacagtagagtaataaccggctacttgatgagaaaattctcttaatcaaacccttgttcttcatgctacacctaaagccaccctttcctgacaaatgtgtcatattttggggtagaacaaagatacctgaggcatgatgcatggcctacctcaacagatgacactgctgacagtcactttattcatctttcagtggctctctcaaataactgtctataattaaatatgctcattaatcttaaatagaggacctcctgggcaaatcaaatttcttgtctgatccatttttgtctagtctcataacacaaaaaaatcagatacaaaataatattttatttcagaaggaaattttgaatcttgaaatgatttatttatggtataagtggtattaattttttgcaacgtgttgatcttcagcatctagtttctcactgaaatagattcaagttgtgatcacatagttaagtgagacaatgacagatttttaggtttttagggtaaaagaaaacttcatcaccaaaatcaatttaaagggatgcttaagctgctgattgtgaagtgaaacaactcaagagtatcctggatgttcggataaatttactagtttttcatggacttgaaaaaataaaataaacattcgttttatccttataaagatggagaagaaaaatacaaaaatcagctgggtgtggtggcaggcacctgtagtcccagctactggggaggctgaggcaagagaatcgcttgaaccctggaggtggaggttgtggtgagccgagatgttgccattgcactccagcctgagcaacaagagtgaaactttgtctcaaaaaaaaaaaaaagatacaaatctatattttccagactaaataattatgccttttcataggtttcttaaatccttggatatattgctgaatttcacaaaaagggacaactttattctttaccatccagagcggtgggttaatttatgatttgacgatctttgttccctggcagcgtggtgagacggcactacacatggcagcccgagccgggcaggtggaagtggtccgatgcctcctgagaaatggtgcccttgttgatgccagagccagggtaggtactggtgccctgaggttctcttctatcgcagcgcatgagtttcatccttaagagagggtgttgcccttcagttccttgatttggaaataccagggactgtaagtgaaaggatcaattcaatagcagttttccagaaaaaaaaaagaaacattatttaagcaattacacacgacgaaaaatgcacccaaatttcagaaacattaacatttgaaaaaatgtaaaacttatcatctaagaaatacatcgactgatattttaatactgttttaacctcggaaagcactttctcatatctctttattttcatgaattttaaaatttaacctaaagtatttagatgctatacatattaaaatttatttcttaccacttaaaccaatcacatttccacagtcatccctcactagttacataaaatcaagttattctccaagttttagtgtttttccttcatctgtttgccttccctcctttttatgatatttacttttcttcttactctgattttacaaatttagacattctgtatttccacagttccaaaatagaatttgggcactgaagattgcttgatcagacttgtcctgtttctaatagcttgtaattccttcacaagtttctttttccttctttttctgtttttaaatcttactttccaatttattttctcaccttcctttacattgaatacaccagaatgcactgaatacactatcaatatactgtaccttctatttccttttccatgtggtttggttaacttttgcactgacatcattgagattctcatgttaaataatttccctccttcttcaatatttgatatacctaagttagagctcatttcagtttgagttgtaccattataatacagtgttatcttggaatgaaagcatctggctatggtcatataaattgtaagtgatttcaggcaggtcacttcactttcaagtctttctttaaattattattatactttaagttctgggatatatgtgcagaatgtgcaggtttgttacataggtatatatgtgccatggtggtttgctgtacccatcaacccgtcatctacattatgtatttctcctaatgctatttctcccctagccccctacccccgacagtctccagtgtgtgatgttcccctccctgtgtccatgtgttctcattgttcaactcccacttatgagtgagaacatgcagtgtttggttttctgtttctgtgttagtttgctgagaatgatggcttccagcttcatccatgtcctgcaaaggacatgaactcattcttttttaaggctgcatagtattccatggtgtatatgtgccacattttctttatccattctatcattggtgggcatttgggttgcttccaagtctttgctattgtgaatagtgctgcaataaacatatgtgtgcatgtgtctttatagtagaatggcttataatcctttgggtatatacccagtaatgggattgctgggtcaaatggtatttctggttctagatccatgagtaattgacacattgtcttccacaatggttgaactaatttacactcccactaacagtgtaaaagtgttcctatctctgccaggcatggtggctcacctctgtaatcccagcactttggaaggctgaggtgagcagatcacctgaggttgggagtttgagaccagcctgaccaacatggagaaaccctgtctctactgaaaatacaaaattagactgctatggtggcacatgcctataatcccagctgctcaggtggctgaggcaggagaatctcttgaacccgggaggcggaggttgcggtgagctgagatcgtgccattgcactccagcctgggcaacaagagtgaaactctgtctcaaaaaaaaaaagcattcatatcctctccagcatctgttgtttcatgacttttaaatgatcaccattctaactggcatgagatcatatctcattgtggttttgatttgcatttctctagtgaccagtgatgatgagctttttctcatattttgttagccacataaatatcttcttttgaaaagtgtctgttcatatccttcgccgacttttcaatggggttgtatgttttttctcgtaaatttgtttaagttccttgtcgattctggatattagccctttgtcagatggatagattgtaaaatttttctcccattctttgggttgcttgttcactctgatgatagtttcttttgctgtacagaagctctttagtttaattagatcccatttgtcaattttggtttttgttgccatggcttttggtgttttagtcatgaagtctttgcccatgcctatgtcctgaatggtattgcctagttttcttctaggatttttatggctttaggtcttacatttaagtctttaatccatcttgagttaatttttgtataagacgtaagagaggggtccagttttagttttctgcatatggctagccagttttcccaacaccatttattaaatagggaatccttttcccattgcttgtttctgtcagatttgtcaaagatcagatggttgtagatgtgtggcattttttctgaggcctctgttctgttccattggtctatatatctgttttggtaccagtaccatgctgttttggttactgtagacttgtagtatagttcgaagtcaggtagtgtgatgcctccagctttattctttttgcttaggattgtcttggccatatgggctcttttttggttccatatgaagtttaaagtagttttttctaattctgtgaagaaaatcaacggtagcttgatggggatagcattgaatctataaatttctttgggcagtatggctattttcacaatattaattcttcttatccatgagcatggaatgtttttctatttatttgtttcttctcttatttccttgagcagtggtctgtagttatccttgaagaggtccttcacatcccttgtaagttgtattcctaggtattttattctctttgtagcaattgtgaatgggaatttactcataatttgcctctctgtttgtctattattggtgtacaggaatgcttgtaatttttgcacctggatgttgtatcctgagactttgctgaagttgcttatcagctttaggagattttgggctgagatgatggggttttcaaaatatacaatcaagtcatttgcaaacagagacaatttgacttcctctcttcctatttgaataccctttatttcctccccttgcctgattgccctggctagaacttccaatactatgttgaataggagtggtgagagagggcattcttgtcttgtgcagcttttcaaagggaatactttcagcttttgcccattcagtatgatattggctgtgggtttgtcataaatggctcttactattttgagatatgttccatcaatacctagtttattgagagtttttagcatgaaggggtgttgaattttatcagttttttctacatctattgagattatcgtgtagtttttgtcattggttctgtttatgtgatgggttacatttattgatttgcatatgttgaaccagtcctgcatcccagggatgaagctgacttgatcgtggtggataagctttttgatgtgctgctggattcagtttgccagtattttactgaggattttcgcattgatgttcatcagggatattgtcctgaaattttctttttttgttgtgtctctgccaggttttggtatcaggatgattctggcctcataaaatgagttatggaggagtctctctttttctgttgtttggaacagtttcagaaggaatggtaccagctcctctttgtacctttggtagaattcagctgtgaatccgtctggtcctgggctttttttggttggtaggctaattactgcctcaattttagaacttgttattggtctattcagggattcgacttctgcctggtttagtcttgggagggtgtatgtgtccaggaatttatccatttcttctagattttctagtttattggtgtagaggcatttatcgtattctctgatggtagtttgaatttctgtggggtcagtggtgatactcaagcctctgtaatggcggacgcccctccccctaccacgctggagcctcccagattaacttcagactgctgtgctggcagcgagaatttcaagccagtggatcttagcttgcttggctcccctggggtgggatccactgagctagaccacttggcttcctggcttcagccccctttccaggggagtgaaccgttctgtctcactggcgttccaggcgccacggtggtatgaaaaaaaactcctgtagctagctcaatgtctgcccaaatggcatcccagttttgtgcttgaaacccagggccctggtgatgtaggcacccgagggaacctcctggtctgcaggttgcaaagaccatgggaaatgcgtagtatctgggccagagtgcaccattcctcatggcacggtccctcacggcttcccttgcctaggggagggagttccctgaccccttgtgctttccaggtgaagtgaagccccaccctgctttggcttgccctccatgggctgcacccactgtctaaccaatcccagtgagatgagccagatacctcagttggaaatgcataaatcacctgccatctgtgttgatctcgctgggatctgcagatgggagctgttcctattcagccatcttgccagcctccggccacttccaagtctttatcagtaaaatatgagggttggactcagaaactcaaaactcctttctagactttcttaacattctttgattcaatgaatttaatagacattttcttgtaacaggttccacagatcttcatgcagaatccagtgatacacgggtagccttaacattactcttgttgtcttggttttcatctgcctttctgtgcattgtccacatagtgtaatttatgttctttggtaatcatcattgatctattatattcttatctatttaaagctttattcaaccatgagcttcccctgccataacatttttctggtttccttttaaggttacctggcattcagctatttgaaaaatattttctatggtcaaccagtgcactctgactatcgtatactttactggaaattgtgttgatgttcctgtaaattttttgtaattcgtatttaataatgaaagagtttcccatttctgtcttaaagtaaaaccccttaatgtttattattcaaattaaaatttctacttttaatggaaatttattcattttcatgtgtctctgccaaatttttctgtattgatataacccattattacaaccttttatctttttggataccctctgaagcctcttccttaaaagcaccactggcaacagagtctttcctttaaaatattaattaattagttaattttacacaaagatttcatcaattctacttttttacttctcttttgcaactacatttagtatcattaatacatatatagctacctcttaattccttattccttctaatttaaatatcaaatttcagatgttatcttttgtttattttttttcttttcagctctacctcccattctaagctacaactgaaatcccttccctatagcattttctattgtgaacaaacaaaaatactgtagccttgtgaagcagtgctccctaaaggtcaatatgcatacaaattacctgggcaccctgctagaatgcatattgtaagtcagttctgcatatttaacaaactctcaggtgatgtcagggctgctgattttgggattatgtttcaagcagcaagaagttagggttttcctattcataagtcctattttaaagcgtactttcaccatgtgtgttttattgtcatttaatccttttaatgtgttcctgggcctctgatttagttaacatttgaacagtgctttagaattcatcaagcatttaaacacaaagtgtcttatttgatacccagaggattcctgtgttgtagggtggcttagcgtcctgaaattcaagattgtgctgattaacctgtggtgacagagttaagataagaaaaagatttctcctctgattccgcatctttctcctaactctttctgctaacgtcattatctcccacttcaaatgtaaagagagcccctcttcctcccatccgaacaaaccactggtttctaattagtcacattctttccctgagcttatgactatgatcaggataaaagatcaagcttgggctcatgcgcattcatgcggcccatttatgaggtgggataagaagaccagcagcccttctagaaccacatggaatatgggatgtccgtttcccccaaatgagggatggctgtcccagaagaagggtgcagggggtattgggcagaaaaatgagcacatatctgctattttacctcttgatttctcaccgcacgcatgcgtgcacatgcacgcacagacacacacacacacacacacacacttttggaaacttcctctctaaacctaataacattgctcgagaattcaccctctcccgaagaagagatagtaaaaaattgtgccaagctactacattgagctccaaggttgagattgctgcgtagttcacaatcttctcaatcaggtttagaaataatatctcatgggtctaagtcatatgttttgcctattcacaatatataacaaaagaaaaaccatatactcataataacatctgtaatttttaaagttcacgcagaacactctattcaccagtccagagcataagacacattttgctggacagactggagagcaggggaccacagtggcctcagttcctctgtcagccaatgtgtttgcacccaggtcctgctcgcaggaaggtccttccttgtccagtgtcctcagtggacattactgagaaggccaccagagcctgaccatctgggagctctcttgctttaggagctggttctgttggcacaattacagggcttggcatttgctttagggatcgagcaatcccaggggtcctaggcttaaactcacttgaaacttagctcatttagaactttagttagatactaggagatgtggctcctgggaaccctgttagctagtaactagtaatagaaattttatcaaatctttgaactttatcccagccagtgttatttttctctttgtaaaaggagctggggctcagcaagtctccagagtaaaatggtagactgcagtggcaaagcagagctcacctacttccggtccaggctgtgtcagccagtgatgctttatgatgagggaattgttgcctctcatttttggaagaggtctatgtgatcaggcttccctcgtttctttaccttttcccatgaatcttttcttctgcacttccccaattcttttccctggtttaaattaacattacccttaagcagtaaattcaacttttgcaattcagcagggaaataattggccaaacctcaaaaagtcttatatccctggttacaggttgaaagattttctttgcaaaatttgcatgttatttccttttccactttcaggtaaagctttagcaaaaatggaaaaaagtaggcaagacatcctattttttaacttttttttttaaagaagaacattaatgctatacagtctaagaaccaaggatcaatagttaataactaaccaattatgtagctacctctagtcaatgattgccacttctcagctatggattaaagagtcatcattgctccaactatccctcttactcatggaaaatctattttagagtgtgtcacttgcaatacccacccacctttatcaaattttgcaggacagagatctgagaagggaaccccagaaacaacaaatgttcatcatagctattctcaagttccttggtttttaaattgttgtttgttttgctaaccatttatttttataaataaaaatatgttcattttatttataaataaaaaatgtttattctcccaattcctctatttttttcctctgtatttcagagaaattttatcttctaatgtgttgtcagtctcctttcctactgagagtcactttgttccgacaggtctgttagtggccatcttattgtagtatctgtttccaaagaatgtataggcagagaaatgtctttagaatccaatgccctgaattcaagttctgttttaatagctgagtaaccttggacaatctttgagaacttgtttaatttttcttaatattgacctggaaaatggtctaataatacattttatgctttccttttaactctgttagaaagatgggtcacatatgcattgtacatgaagaaaggttttcaattgcaaatgttcacaaaatttcaattctagtctaaaataatcatattactgttatttatttacttcttactaccttggaattcatgcagtgctattttatctcttcctatagctcctcttcttttttcttataactttaagatactgcatgtttttggatagatctttcttcctctatatacttttctccattcattcttagccctgaaagtcagcccagttttcccttcctcacttttattatgacatgcccttgggcagatagtaaagatatacctctttttatcactaaagttacactcaattttctttttacaagagaatggtttggcctggttctctaaacactgaaaacattatttccaactacacttcagagtcaggtgattttcctgagcctcctggaacatgtccttcctgtcccttagacccagctatatcctctgtttttaatggaaagtacttggcaaatagttcaccctatttgctttttgccagagccccatttcattttttaagttctggatgcaagttccagaactatctacagcattttctgaaacatcttttaaaaccagattacaatatcttctttgtgcactgtttctccttgaagaaaatgaccagcatttgtatccttggcttgctgaatggagtaaaatcaaagattttccagcatccctggttctttttctttgaaagagttcccagaataaatcctgtttctaagtgaaaactcttggatgagaatataggtcctaggacttttggactagattttattcttattccaaaccatcagttagtttatatttaaacataagtgaggcctaaagccttaatgagttgagaaatatttcagaaagcagtgatcaagttcatggaagtatatgctttttaaaaatcaaagggagactttgtgaccaacagggtcactgctgtagcaaaatataaaatatgccatggttaaagcagtaatgattttcttttgggtggggttcctagagattccaagaagacatcatgaaatatgtgagtgaaacatatcaccagtgaagttctgtctgcccggcactaactttttacttggcttgagttgtaggaggaacagacacctttacatattgcctcccgcctgggtaagacagaaattgtccagctgcttctacaacatatggctcatccagatgcggccactacaaatgggtacacaccactgcacatctctgcccgggagggccaggtggatgtggcatcagtcctattggaagcaggagcagcccactccttagctaccaaggtaaggagaatgacatcatgagaacatggaccaagaggattcctaagtcatggcctttctgctctaccacatacagaatcaagagggtagatctcctcaggccttgacttacttccttctctacatatttaagactcattgtctaaatgatttaatagaattgtgagattccgtatatcttcaataaagagtgctgaatttcattctaattaatgccaatgtttctaggacaggtatctagtactctaagatgattttcactttttcttctcttttattataaaatccataatatattcttaagaaaaagataaatgaaatccctaaatatattgaactggtaatactaatgaggaagagggtactgcattagattggcagtactatatttgctgtgagttatagtaccagatcgaagctcaatttacttgtacattttcgcaaccctactattagccaccacttatttgacattctcattcccatattagtttccaactttaccaactacacttttgcctgggtatttacagtgtttaaagagagctgaagctggaaaatcacacttctttagttgttattgacatcgagcaaagaattttacttatgttccaagtttcatgacagggcagagtaatttttcccatgctttatacatgctgtttgacattcataatttggagatgacttagaataaaacatgaatatactcagctaattagagcaaaattaattgagccagtgcaagtgaatttgtcatggggcaaaataattcccacaaatgtaacagtgattcagattaatgaaaggacaatttcaattctctcataatcagtaggtataagtacttcatccagggagagggaaagttgcaaatttaaactgagatagtgatgtggcatctgtcctcttgtaagtaggagcagcccactagctgttatggcttatctggttgcctgttatgacttacctggttgcctatggctgtaaaaggtattttgatataagaaattgacaattattgaagttctgaactctgaaaagttggaaggattttaaaagttcttaaaaaaaaaaaaaactaagcaacaaatgtagtaataacctgagagatttggtgattgtcttatcagaggagggtgtaaatcatcaaaattaagatacataaaatacagaaatagataataaaacgtagtcttttgtctgtcaaagatatttaggatttaaaaaatataactatatccatggtaaattagggcgataaaatagaataaaatgttaaacagtgttttttttttttttttttttttgagacggagtctcgctctgtcgcccaggctggagtacagtggtgcgatcttggctcactgcaacctctgcctcccgggttcaagcgattcttctgcctcagcctcccgagtagctgggactacaggtgccctccaccacacccagctaaatttttgtatttttagtagagacggggtttcactgtgttagccaggatggactcgatctcctgacctcgtgacccacccacctcggcctcctaaagtgctgggattacaggagtgagccactgcacccggccaaacagcattttaagagttcagctgactagggctgaacagtggttgattcatcattattaaagacatttaagagggtaaatgaaatcttggtgagattaacataaaggaagaaggcagatgtgtgactcaagagatgccttctaactttggttttgttattctacagtagattttatgtatttttgtctaataatcatttccaaacttataagagttggatcactattctagcaagactttaaagataaggagtttatgttttcttcctcatgatgcagttagcctcaaagaactctgtttcatcctgagtatcaccctaatcattgtgtgcattgagtggagggaggagagctctaaccacaaatgctggtttatatggacaatgcaagaaggaataaatacttcctacgtttgtcccacacttggaaaaaaccagaagattcgctctcttccaaggatttattaataccaaatgttcaaaaaagaagcaaaaagaaaaacgtcatctcatttaaaaataatttgtctggagacaccgaaagggcaatattgcttcttgggggatattctgtgtttatgatgggggcttaaatggttccaggataagccatggcttagagcacctaacccaggcatatttgctatgtgttttacaggccctgatcggtgttagaattcccccactcccactgtagtgccagaagagcatgtggttaaactgtctggccaagaggatggatttgacatcatggtgtaggaactgtgccatcctcgagatcttagtccagagacttatctgtatttataacacactgctaattacagagtaaggccattggttaggcacggaagacactgaatgtacacatatcaacatgtgtaggagagcagccctctaaaaaaagctctaaagcttcagtgtgtttaaaagtctggtgttaatcagcccaacatcatgccagaagtagaacgtattttacaaaagcaattggtcttttagacagtgtgagtcttttgggaaaggggacaagtcaggatgggagttgctttttaatagtacatgttttttgttctatagaccatttatcttgccatttctgcagaaaatatgtcaactaattcacgaatacttgtttttactatggctgccaaaatatcctaaaatttaaatgaatttggaattcaggtgttataaaaaggattgaaagaaagagaaggagggttggagagaaggcagctgttgtttcaattctattaattttagaggcaagaaaaggctttttttccccattcacaaattggagccagtttactgacactagtggcttttaaaaatcccaaacctataaagtcagatttcagtctccaagcccttaaaataaaatttcttttattcagtctatcaagccaaacttttgtatgttaaattgtattctttttctttgtccttgttcatggctaacagatttaatgctaccagtattttttccaaatgaagaatcagtatactttgctcaatatgttaacaaataaaaagattttttgaggagttacaacaataaatacgattttacttttgtttctcacattttcagaagggttttactcccctgcatgtagcagccaagtatggaagcctggatgtggcaaaacttctcttgcaacgccgtgctgccgcagattctgcagggaaggtaaagattttctatacgttataattatgtaacagtgaaggtgatagattaggagatctgtaaagacatttttctcacttctctgaaaggaatgtgagagcaactgatgaaactatcccaaatagacatggtggcgatgtcttccatgaccgtccaggtacatacacactgattcagaaagcattttgagctgtgcctcaaagtcttgtcacaacagccccagaaagtctctatattaagaagaatccctgcaatgttaatgtagtatttcttacatagcagtttagacctttttacattgtgaccctcaagatcccctttgctggtggtatgctcattttcaattttagttatgtttttaatatgaaaattattagggatttgtttattttcgttcttttttctattgactatattaattcattaacatgaatttaatcaatatcagtttccaggcatcctggtagcttcagggcagctaaccctaatttattaatgctgaaacttaaacacaccctttacagaacggccttaccccgctccatgttgctgctcattatgacaaccagaaggtggcgctgctgttactggagaagggtgcttcccctcatgccactgccaaggtgaggaccacagaaaaggatttacaggcatagggtgtaactatcgcctgaaaacacatgagaattgtcttttaaacacatggtatagtataactgcgactagtcctagcgatagtagcttttggtattgacacccttttttttcccttgtatttctgccagttgcgtcttgaaaatcttttttaagattttttaagagtcagcaaatattaaggggatgtgcctataaaccagtagagatgaatcttattgctaacattctgtgtgttagagaatgaagtctgaattttgagaactgagaaataaagtcattaacatattttctcttctctcctataaaccaaatgctatgatgaaaatgtccttttatactctcattctttccgacttcaaacttctatttgtttctttgtctttttttttaatgttttacctgtgttaactgtagcatggatccctctaagtccctagattcagaggtggtgggaggatgcctttttggtgtatatctagcaccaaattccgaaacagctccaactaagacttgtacttacggacagggcatttcccaccattctagttggccccttattacactgaaaatatatatgaatgtcgtataatgcataaagtcctcattgcgtctttcgttcattaattaagcacagctattttgagaacacatcagggtttatttaaaaaatattgattgtaatgggaaaatatttatgctatattagacaatataataaaaaaactgccaccatttatttgccaaacactatgccgagcactttacaggcaatatctcataataaccccatgagactggtattctaatgatctccgttttgcagatgagaaggtgagatttaagtaggttaattttccaaagtcatatgaataataagtgttagagcttgtacctgtgtttgacctcaggcagactgactttagagccggtgctcttaaccactaggtcctttgtgccccaaagcaatagagggagatttattccacttctgttatacaaatatatacatatatactcatatgcctatttaaattttatacatattataaataaaaaataggatatatacataaaatatgttctgtataatatatattttatatataaatatattatatatatcataaatatataactttgtacacatacatacatatacatctacatatatttatatctttttgatgccaataaacagtttataataaagtacttgaactgtcaaaagagggtgccaaatgttcataattatccacactgttcttactcctcttttttctacaacctcatcaattcagcacatattttatgtctttctttacactagattataagctactagaggagtgttcatatcatattcatttgcatatctatgaggtgtttaataacatatgtgagttcccaataaatttggatgaaagaatgaagattgagcaactatggaataaaaatatacctgctcacttaacataccagcattttttttttcattagctttccaggctgaccattctcaacatagatacaaaagacttcattagtactcatgagtactttcgttgaactcttacaatgtgcaaagaaaggattataggtactcaatgggaggtaaaattgtaaaacgtgtgttctctttccacaagggactctcaatctacttgtaagagaagacctagattataaaataatgtgtatagttttcctaaggagataaacatagccttgatttctagcctctaccttgtatggtccttaatcttaggcatgcacgtaccgagttcagaagatgacataaagcatttgtctactccagagtccacagtaggatgggtattctgggaatgcctctctagtgtctttcacttatctgccccagcctgtcaatgaacatgagcccttcatctttggggccactcctagagggctccagatggtaagatccccactgtagtctccactttagactctctttctgctcattataatgtctcctctccttaatacacacggtcctttggccacgagaactttgcttctttccaccagagtccagaaccttctcttagtctttattgggagtgctgcaattatttgagtccaaaaatgtttcctctttgtggagtaagagggcttttcagatcttgtaggttgagtatctaccaggcaaacctcctccattgccagaattgacaccttctttgatgatcgcttatgttgttttgctaaaatatccctgtacctaaccttagtagagcccatgctgtaggcagtggggtaactaagactaaagaaacacattgtagcaaaaagaagttgactaaacttatttggtccacaaaaatctgtgtgtcctttttttcaatagagtctatggacacaaatacagtattttgaagcatctgggacctctgatcagaccctgaaaaggcttccaagctgaatttccttcagttgcttcaggagaaacattgtttgtcaaaaatgaaagatacttattcttgcttggagaaatggggacagagtagataatgtagggttgtgtgaggatcaagatttgatgatagctcataaagacatttaaattctcaaaacacttttttattttttggtacactttgcagttagctttaaggaaatagcatgacctaaaaatacctctcaagtttgattacaggctcaaacctgtaatcccagcactttagggggccaaggtgggcagatcgcttgagctcatgagtttgagaccagcctgggcaacatggtgaaaccccatctctaccaaaaatacaaaaaaattagccagtcatggtggtgtgtgcctggagtcctcggtacttaggatgctgaggtgggaggatcacttgagcccaggaggtggaggttgcagtgactgagatggcaccactgcgctccagtcttggtgatggagccataccttgtctcaacaaataaataaataaaacatctcatggtaatctcacaagaagcacttggtcattatgctctctttcccttcagcatgtcactgaagggaaaagccactgtttttaatttctatcacacattttgaatggaaaattctaccggatttgataaagaaaaggaaataaaacaatatatgttgcagacttacagttgttccacatttttttcttttaactaaacatggggtatagagttttgttcttgtaagcagagtatgagttttcctgtccctctccacaaactcccgcccgaaataagtagcctcatatttgtactttcaaagcagcaggttataaagaaggggagatctaggatttgaatggaccacaagattcatataagctaattttgttgttgaatatattttaaattagaatgcaacccattaaagacagggatcatgtcatgttcaccattgtattcccacacctagcacactgctcggcatattctaggcactcagtaatatttgttgaaccagtttaaagtacaatccaaacagaagcatattagttggagtattatagtaagataatagaaataattccatttgattctttatgttataaccatatgtgaagtgtagccttggttccagatagcacacacaattcaagagcaatattgacaaactagaatcagctcagaacaggtcatccttatagggagagatctagaaatggcacttccatcaggaatggttgaaggaatggagaaaattaacctggaaaacagaaaactaaaggtggatatgaaaatcatccccagtatttaaaggatggtcatgtagaagaggaacctggcttatcctatgttgcttttcaggagagaagcaatattataaggagagaatttttagttctggagctttgatgtctatatctgtcttacagtagaatggggtgccttgtgacttttattgtagagattcggttattgttgaatggaaacgtgatgagtaagagtttggattaactgtaaactcacttttaactcttctattgattagagatttttatttcctttagagatacgtattagagcaattgttaatcttactctatatgcatgtgttttatttttgttctttttagaatggctatactccgttacatattgctgccaagaagaatcaaatgcagatagcttccacactcctgaactatggagcagagacaaacattgtgacaaagcaaggagtaactccactccatctggcctcgcaggaggggcacacagatatggttaccttgcttctggataagggagccaatatccacatgtcaactaaggtattctgtcctttcttgcatcaatcaagagtgttttggatgcatgtaaacaggaaccaatcgcagacagtttggaacaaaaaggagcaatgtattaaaaagaaacagggatatcttacagaccccaaggacaggaagggagtcaagccttatgagagattagaaaaccataaggaagcaagggagagagactctctgtatggcaacactttggcttcttgacttttctatgcaagtcagtttcattcatctctacatccccgctttccttgcttttctctgtgtgtctaaagaggctaccctgtagctcccaatgttaacatcactataattgctccagtgtctgctgctcctcattctaaatttcatatgtatagagagagaaagaatgcttccatctggggtttagcttaaacaactgcctctaaactggcaggccgatgttcaccacccaaggcattctttagtcctgctgggcatctgaggcacctatggataggagagaggaaactcaataaaatacagatttttttccatcaacgtaggcctagcttgagaggtttggtggtggtggtgagaaaatcatttttttttaataaagcacatcagtcattttagcctttctccagggactggcctctatagacctccgcattaattataatacaatggcagtcaaagatataatggaaaaatattcaaatataaaaatatatatttttacaagtatatgtcttttgatacatctatccatccatctacataaagacctatagatccatctatctaactttctatcttacacttatatatatgctgctatagccagctgctgagaaacacagaattggaaactgtatttattaagttggtctgtcatttgatgtcttgatgctttttgtaatacattatatgagcttagtgaaaattacgtttcttagctccttccataaatatacaaatactctatgttttctacatttcattgttagttggtacttttaaagtatcagtgataagttggtcttaatgacatttgtaaataggttatgtagcatgcatccttcaggaagagctatgaaacaggcagattgccttgaatacttctgcagtcctagtctattttcttgtcactcagaagtgttcctgtacatcccctgcccttacgtacttctctggcctttataaaaagtccccacaaatccttttttaaagcacgatgagagcaaattatagggttagtcttccaaaggatagttgcatttttataagaacgaacacgataaagccttatagtgaaattccgtgtatcagatggacaatcattacagtctagggcatgggcgtccttgtgactgttgacgtcatgtcattcaggtggtcatttaccctgttggagaaaatgtgatcatgaagcatagaatattttatttagtattagtgtatgaagggggcatgtgtttactctattaataacaaataaatcttcatttgaaaatcagccaaagaaatccataaacaattcagcagtattttgagtaggattaaaattccagatagttcatgaaactgatcttacagtgcttctgatggtgttatttttaatttataaaaatgacaagtacatatctgaaatcagttcactatgtcctcctttacggtattcttctaaatacattactttctttgacagcgttttatcagttagcaaacatttaaggagtattttttagttgcacactcagcaatgaagaaaaacattcaattttgaatcacaaagtaattttgttatctttataacaatgatttcagtattacatgtgagtggtgtcctaaacacatagtatgtttatcactagagtaaaactttagtaagtttacacagatatatctgaataataatacaatatacaaaatttacataaaacatataaccttgccttttggttagaattataagataatgcaactataaaaatatctcagataagcagcaaaactgataaaataatttcccattgcttttgaagaaaacatatattcttttctttttaaggccaactcaataatttcatagtctccaaatgattatttcacattaggaactataatatagaagtgatattataatcattgtccaaacaccatctatcataaaataaaaccaaaaaagatccgtcgttgggtccaccagtgtgtcttaggaaataaattactttttttgaaaagaacttcaacactttctattttcttgatttattagaaaagttttttttttttttccagaaacctttcaaacagtgtttttcctctattctcacacctaccacacaacaatcatcaacacagaagacttctgtgaccaaatgcggagaggttttccccacataccaagcagcacacaccagctggtgtcctccaattcagttctaacactgtctatctggagagagtgttagatcccttcagttgagggctcagtccccaagactgccctctgcacagacaccaatcacaagtctgggcctctgaacttctgacctactggcttcaagttggggttcccaggacactccctttgagttccattaattcactggagtggctcacagagctcacagaaacacttacattcacagtgcttacagtttcttataaaggctattacaaaggatgaagatgaggagacacatagggcaaggtatgagggaaggcacacagcttccatgcccttcctgggtgcaccaccctccacaaggaagctccaagtgttcagctatccagaagctccccgagccctgtcctctggaatttatggaagcttcatgatgtcagcattcattcccccaggatataggatgggactgtctctctcaggagggtcttatgatccacaaatgctgggagggaagattagagcctagccttagggaaagtgaaaggaggccgggggaaggtgggagatattttgtttcctgaggcctggccctgaggcctaaaacgcacaacgttataacaaaagactgtaataacggctatgggagttatgagacagcaactgtggacaaaaacctatattcactgcagtttacatcctttgatttggatatgcaagtttaccacaataaactgcagagattttcatactggttgttagtttgtaatcttgcattgcagaaaatccattctgcaaatagagcagaaaaaagcacacatatttaaaagtcatcaaaaatgtctttgagatttgatgatcacttcatgtgatgatcacttcaataacatttttaaacagactatctctgtaaagagaaatattctgtttgttattttagtaaggagaaaattaagaaagaatcttgttttatcctaatattcacattttttatacattaggattaaataatatttgtttagaagtgaagaaaattttaatagaaaaggatacaccttctatctcaccctgtgttttacgaaactcaaagttgagctcacccagagctctcaggattaaaaagctccaggcccacaaggaaaaagcctcctctcacgttgtagaatggttttctctctctaggtttcacttacatttttgaaataaggtcagtgtcctttttgatttccagaagtagcaccatggctggagatcatgaattttgaagaacatggcttagctttctcagcctaagtgctaatgcaggagagtgggcctgaaaagttgtggtcaacagggctggtcaattttaatcagatgtgaactggggaagaggtgctgactcagagcccaggtagccacctcagtctatagctgcaggatgtccaggaagagcataaatatactaggcatttgaacaatagtgaggggagagaaatatacagtataaatatactgtaggctagaatgtaagctccataaagacagaaacttttgttcactgctgtattcaagtgcctagaatatgaacacttcatgacatatgaaacatactcaagaaaacacccgtaaacatgtaaggctaccagagtgtgacattggctgaataagccactttcccccatcttttctccatgcctttctttttttattattaattcataactgtaccttaattggatattcaaataattacttgatgtatatataccaaacatgttgcataaagctgagcagttgatggtgctgtataaataatgaggttactttaaggtaatgtttagaggaacctcctgaaaagtataccctctttgggtgctggagaaagtttttctgaactcatttcctgtaactgtccattttttacactgatgtgatattttgttgataaaatatagatgattattatgcttataaaataggtgtaatagttggttgatcagctatttaaataaataagttgatacagcgggacatccagatggatttgaaatacatgccatttgaaagcttattggctgtgctattttaaagtctcacatcataatataagaacccattatagaaaatagaaaatgtaatttgcctgatgtgttgattgacttagaggacatgtcttagaggaaacaccattaatttagagagtttgccttgaatatcagaagatatagtttctgggaagaggctatgagttttccaggatattttcaatattttcaatattttttcataatattatagatgatgcaatgtattttcttcttcaactgtatccctttggttccattctttctgtagagtggactcacatccttacaccttgcagcccaggaagataaagtgaatgttgctgatattctcaccaagcatggagctgatcaggatgctcatacaaaggtaaagcaaatcactctcagtattgtgacaggttctggctgggatgattcccagtagcccccattcgggtcaccccatgtccagggtcttccctcctcaagagtccattctgaaatataaactaatcataaccctctcctatgcacaaatctatggtggctccccattttttgctagaatcaagtccagtggatagcatgaggtcaggaccctttgcaggaagactccaattttgcagccttaagtctatcctctctcttactgctttagctagttcacatgacttgctgcgttcctcttctatttgctcatctccatgcccttggtctggaaatggattttccctctctatgccataaaattcttacccattctttaagcctgctgtagctacatgtttcctgcatctcctatcagagtcattctgtctttgctgttttcagatattatttatgcctctctcttagttctttgcagattttgtcacccacatctgatctctcttgctgatatgaagttccctgtggtcaggggcacatatataatctgctaaataatatctttagtcaaatggaatcctataataactgatactctacccagtccttctcctctggggtattaaccactagagtagtaaagtttctactttatctatttttaactttttattattatttacagcttggttacacacctttaattgtggcctgtcactatggaaatgtgaaaatggtcaactttcttctgaagcagggagcaaatgttaacgcaaaaaccaaggtaaagtacttgtggtcattttcaattcctataagcaaaaaggttcagccatctggatgcttcactagtttaccaaagctacaagtgtatttttttcttcctttttagttctaaagtgattttgacgaggtgatgtagttttgtaattatttgagaattttcattctaataactttgacatccatgaaggttagcttcgaactacttctattataaagttaaagtagctgacatcgatttaacaacttactgcaggatacaatagatgccggctagaacatcttgatgttctggcagatttcctttacattgtttcagtggcttggcccccctcccctgaccccttctcctctcatgaagaaatacagacagtcagcctagactgcgtgcctttcatttttaatgaactctgtcacattcagaacatcacatggacatgctcagtgaggcaataatgtataaggcctgggctggaagttctcaaggataatgcagagctgacttgatcccagcagtttccccagtggcatttgaaaggtcctattcagcaaagcaaggttggaacataacactttacttcgtgcactcaatgtggttcaaggtgaatagaagttcatattgtaactgtggctattatgcatactataacttgcagctccaagttctttgatccaaagaaatatttgtttgcacatttatttaagttcatatatcagaaatttctttttcttttttttttttttttttaagacagggtcttactctgttgcccaggctggaaagcaatggcacgatcagagctcactgcagtctagaacctgggctcaagtcattctcttgcctcaggactggctaggactataggtgcatgacaccatgcccggctaatttttaaaagtttttgtagagatgaggtttcactgtgttgcctaggctggtctcgaactcctgggctcaagcgaaattctcccaccttggccaaccaaagtgctgggattacaagtgtgagccaccaagcctggcccagaaatttctgactgcagctatttgaatgggctcaagtaaattagtgtgagcacattcaggacttttcaaagccatcattcaagattctataaattaaaaatatacagaagttttataagtcagtctttatattctcttagaagcagaaacaaaatcatttctatacataagcatgtttatagctaatttaaaataaacttatttttaaactataaataatactattaacatttaagatttaaacttataatcttactctagcaagaatagcttgctgcctagtttctgaccagttcttaagttctcatgaaattgaactttgagacttatttaaagcctctaatatgaattctcaggcattagctcctaaagccttttctgatgagccagctcccatataagcactccaggaaagacattttggttggaatccaagtattctcttgaaatgaacaaatgcaacagtacagtgagatgttggcagggcttgaaaatgcttatcatatttttaaatgtttcattgttgaaatggttataatatttagtaggcaaacactatattgtctagagaatatcaatggtctccctggagtttgacctgcactgaatgaagatttgattgaaagaaaaatctcattttatcatttcagttttttttgtttttttttttttaagtgaactaagttgcttgcagtgttacatttggaaccatatatctttagggaaatagatacaaacctcaaaggacagtcttttaataaactcttcagattttttttcacatgaaaatgacatctttgggaaaggaattaggttttcttcctcatatcttatgtgtagctgtagttactaaaaatggattcattgctttaaaaatgtaaacatatacattaactttactctgtaaactctcatgatgtggtataaaagatttggcaaaattaacttgttttataagactatttgttgcttaaaattagaatgaaaccctgttatagcaacttgggacgaaccagacctggttaatcatatatttaatttgtgaagagggtttagaacagcacatgaaaaaaattgtatttattaaagacactgtgaagattatagagctcttcaattagaaaaacaaacaaacaaacaaacagaatgaaaacaacaccaccaaagtgattgctaaaattttgaaagctagaaaataaaacatattcatgaacaacttatcttatccttcatcaaacttgaaatcttggccatttccatttttcaaatgaggaaactggggcttagagaggattaagggtttgcaaatgattggtagcactgggtctagagctcctagccagatgggcctatgacagtggattaagaatcaaccaaatgtttacgtaaacacttctgaattgctccagacttccctggcaaatatcctcactggggatttcaggtaaaggttagattaaatcagggctggggaacatttttgtggccacaatgtccactgatctattgagggcaagaacgttgctttggcattattaatttacatatatttatagataatttaggtttgtttatatattatagtgatatattattttattaatttacatgctaagttatttagcacatagtgtgtgattagtaaatgcttgttgaatgaattaacttggctgatactgaaaagatgaactaaattcaatggatttaatggatgtaaacacaacaaaaaggaagaatttttacaaaaagaagtatcgcttagtgtattctcctcaaatgtccatggattatctgatttgaccgcagagtccctgtaatagccaaaggcttcttggagtccctgtaattgatttatattttcaggtttcctggggtcatcccattgtagggatttataaggagatgtaagacttccaacatgacagagttgaggatgtgccacacttagagacacttaggtaaccctgatacatgtgggcatgttcctatgggcagacagagtgcagtgaatttataaagaaatcatgtagcacccacatctatagtagacagaacaagcaaatatgtatgttgctcacagggcagcagtgacattggatgaaaggggtatgtacacttaaaagcttagagtatgaaagggccactcagaacttagagcccaggacaactgggtctgaaacatatagataaaattttatgagaagtgaagcaggtggattttaataaataatagccattgtctggtagccattggctgtcatagtcttctgcacaggatctgaacctcgcccgattgtggagaaattacttaactttcttattttcagtttcatcacgtctgaaatggggagaaaagctgttcttggaaaggaatataagatttagatttactttcaatgatttagaatccctaaagctaagccaaaggttaattattaggagagtcatgatgaacaagcagtggtttatatgaccctctgcaaccttcagttaaaaacaattttaactcttgtttcccagggaagaaatcacagataatgctgttttcttattttaaatctctcttctcagctcagatgtgagcagaagtcgactgcacccacccccttcaccttcttaagggagccctcctttttaatgctaactggttaaaatgtaataatagttatcatttggagtctgttaatcttgtttcatcagctggtctcttctctttgcttagcagaccataaggtgtgagggagtgtttgctgctgagaaatgggttgctgatcatcttgggctccaaataaagcatctgtgatggttttgttgtaaataagactattcaaaatgaaggctaacctaattttcctctccctctgccaatcgggtgctgggcccgccaccactgtcctccacagaacggctacacgcctttgcaccaggccgctcagcagggtcacacgcacatcatcaacgtcctgctccagcatggggccaagcccaacgccaccactgcggtaaggcagacgccactgcccctcaccacgctttcttctttttcctctcttgccctggtggcttcttgtctgagctgagtgaggtcagattcctcctctttaaataagccccctggactctggaaagccccagatttttgggcaggctttccagaagtcagtgtgacttccccagaagtgcttgccctgggagggaaagcagtcagcctgactctttggctctctctggagacgggggccctccgcttgggctgctggaacgtgctctgcttacagctggctctcagatgtgagcacaaattgaccccccctcgccttcttaagggagcacagtaagggagctgctagcttaaacaaagctcattgagttgtggagccattgaaatgtaaactaagcggtgcaattaaacgaactgggatcccgagtggcctgggttggatgcagcccgaattgcttgcctgtgttattttgctgcacagtgagcttctgcacagctgtagctaaatatgttaccgtgttcccgatggtaacatcttacctgcagcagatggcctgacttctgatgagggataagtgtacctggtacttgctaacaggttttggagacgtcatgaggcactttcttaagtgcaatacagtatttgtagaagatatttgacaaccttagggttaaagcgtcaagtgcttcttattaaaaagagcaagcagatgcaagcttgttgtgttaccatggtgacctggcctatagtctgaagaagttacaaagacagatttagacgtaatggtaaaaactagtgattttcctaagctgtgccttgttttggaaggaaatgctggctgatgcagagcagcgggtgagctcattggctcacatcgcagtcctctctcttatttctcactctctctctttcactctctcttcagaatggcaacactgccttggcgattgctaagcgtctgggctacatctccgtggtcgacaccctgaaggttgtgactgaggaggtcaccaccaccaccacagtgagtatgagtgactgactagcttcagccctgttattcttcgttttcaaactaaatacatgtacagtactttttcactcacaagatgtttggagcttttagttttgaacttctttttgttgaaagtattgtagcacatacataggcgtatgcagaagtaaatggattcacacaaggaatacagggcttcggcttcctttactcagcatctatccctataaaaatgtgtgaatatagttttataatatttaattcctttttctgtgactggcttcttattttctggcttctgtgccctttcctttagttgtgtgtgacacctaccgctggcaaagcggtaacacactccactgcaaacttaccttagccaggaggtcaggccagcctctggaaagaccctgctcctcccaacactgtgctcatgactggatcaaatggactcccagtgagagcaattcatccttactttgcatcttatttctgattattattttttaattcaaaaagagaattccttgtgctttctaggtaaattgtttctgtgttgtgaaaaagtatattttaaaatttcttattttctctgttttgaatacaactgctgactcttcatgacaaatcagtgattatcactggcctttgctagagaaactctagaagagtaaagaccatgacaatattgagtcctaatgctcctgtaccattcagtgggagcaaagtttaaaggagcctcctgagagggggctcctacctgaaagtggaagtgctattatatttgcatttattcactcactaactttctactttaagcatggattaaagaatggctctttaatttagcttcgtaaagtagaaaagtagaacagtacgacatgagaagctcttcaaagacaataaaaccacaaatgaacaaataaagaattctgaaggaggttctagtaaatgctccaaactaaaaatgcatatagagtttgaaatgcttggtgtttttgacagatgtgaggaaaaagaaaggaattttgttcttcaggctgacagtaagttcctgttgacatatattgaagtgatggaatacagttggtttaacgtgcagttttaagcagagtggcctatgatttattaatgagctgcaagacacaaactgaatttagatgggaaagaatagcactgcttgttttctgaagcagaatcttaaaaccttcagccagttcaccacaatatttttaaagatttaaggtatagctttgataaattatataggagaaaaacaggtcttgtcactgcctagcaccatacttgtaggtcactatatttaatggctttttcttattttatgatttcttataccaggaaaatcttcatattaagggcctacacatatatgccacttcatttgatatctttaaaacaaggtgtacatcacaatacgtgaagcctttagtggcaagattggccaagcacacctgttctgccattagaagtcatgttttctctcaactttttaccttttccctgctctgggaataatgtatgtttattttaccaagttatcactagatggcaagcttgtatctcttgctatcttgtacctactttgcttccattcatttcattaactgatttattccttcattatttattggatataaaatatgtgctaagttctgtgctaagtgctgaagaattatcagtggtgaaaacattactcctccccaccagcaacttcagtgtcatgagagtagagaatgagactcaggcttggtaagaaaatacattcatattttactcaacaaaactatggaacttatatgtctggtttcaaagagatctcaggtttgtagatattactcaggtgaatgacttcaaacaaagatctatatttaaaaagaagagcaaataagcattctctggtttgtctctaaatactgtaattgctgtctcagtgtccttgtcagaaatcagatacaagatcatctctctaccacatctatctctggaaaagatgggatgaaaattccttttagaaccccctctgtgagctttttttcttttctggtaactattattctctacattctgtagctgagcattgctccatcaaaagtcgctatacttagaattcaagtttctaggtgaaaagccaataaaaatagaaaacataacagcatttctcctttcagttaggacactaagaaatcattgtccacatgagctaaacaagtatctctgttacctaaatggatagttttaatggttacatgtttcgatgctggtctctcttcactgtctgctgctctttgaactggtttctcttataattgtgagcttaattgttttgtgaaatggaattttggggtaaggattggaagaatagacttattctcatctattctgggagtcttcttacaataaacttcctctctttggaaagagattttcaatcattcttttcccacataatattttttccacataatgtattgttaatgatattaaaaacagtaatatttaagtttaaaaatatgtaaggcattgagggaagatctaagcttcagatttaggttgtcgggttttaaagcccatgttcttaacctttctgatataactgactttggttttgctgaaaatagcttaataggaattttgtgaagaaactgttttcacctaattttcaacaaaaagaaaaaccacttaaatagtgctctttattgatttttgtgggagagtgatattcaatatcattttctaaaatctacagtcacaaaaataatttgaaactactgatgatagcacaatagacaacttaatagttaagtaaaattaataaaagttaatgttattaccgctcaaatgcaacagttgcattacacctgcacaactgacatactaatttaacatgaattggatttgtatgatgtgccatatgagcaaccatgtagtccttttgatcaaagaaagtttcctttcctattctttcttttgagttctttaccccaaagtatgaataaagtcgttgtgtagagaccagaataaggcagtagtttgtaaaggaaaaaccacttctgtagaaacttctgagacattttggaatcgtagtttgtttccttaacctttgcttttctaactttactttgtgagatacagcagggaatatgagacattttagcattctcctgggattacaatcactacatgtttgccagaatggatatcagaatggtagagacacatttctggtgacagaagccaacaagcccaatccactaatgcagcttggaagaactgtgacatatgactcatccttccgctaattgatcaaccatcatcaattatttctattatttgtataatcttaaagtgattgtgttttatgttgcatataattggtatgcagaccataaattactgaataaattagtaaaataaaaatattatcttatattattacttgaacattagggaatagttcagtaaactcagaaaatgtgaatattctaagtcctaaatcttacctgatgccataagtcagttaacatgaaaatcaggggaggaggggatagaggagttgtctaatgggtacaaaaatacagtcagatagaaggagtaagatctagtgttaggcagcacagcaggctaactatagttaactaaaatgtatatttcaacataactagagaagtggatttggaatgtccccaaatccactggggaggcattttggcctcccaaaatgataggattacaggcctgagcccccgctgtgtattttcttaaaaagacatacttagtgcagaatctttttaaacttttgacatgttttttcaacctgttataattgtctcaattacatctaattgggtattactttcagtgactcacctttgttaggactttaaaaagaaatgataaatgtttgaggtgatggatatcccaattaccctgatttgatcattatacttatgtttatatcaaaatatcacttgtaccccgtaagtatgtacaactgtgtatccacaacaatttaaaaattttaaaaataggagccataaaaatggcaatacaataaatacttgtaaagtcatttgacaccttttgaggtagagccaagatcttttctttaaatataggtccatcgattagaaattaaattgccattcttgcacaaacaatatcaatacctattatattatgtatatatatgctataatatgtatatttatatgatatttgtatgttctgtgtactttccttttctttctttttttttgagacaggatctcacgctgttgcccaggctgaagtgtagtggtactatcacggttcactgcagctcaggtgatcctcccatcttagcttccagagtaacagggactactcgggagtagtaggtgggcaggtgccaccactcctggctaatttttgtattgttttgtagagacggggttttgccacgttgtccaggctcgtctcaaacgatccacctgccttggcctcccaaaatgctaggattacagtcctgagcccctgctgtgtattttcttaaaaagacatacttagtgcagaatctttttagacttttgacatgttttttcaacctgttataattgtctcaattacatctaattgggtattactttcagtgactcacctttgttaggacttcaaaaaacatctaccctagtttttctagaaaaaaaacagtatttacataatatttaatttagttattaaagttatattaatatgtatgattggtataagtatgtttagaaacaaaaacaagtttagcttgaactccactgatggaagctatggatgagggccttaaaaggtggcatcataaccaagatcactaagtatgctgtggtggcttagggattatgtgatataaatgcaattggtgaccaggaggattggctgagtgagggttggctaagtgaagatcagttaaacacacagtttcttttgcatagaacaaatcagatattgactactatttgtaaagcagaatgttaagaactcctactttattttctacatttttcatatcgtgattaacaatataaattcattattaaatctctcttccatctattatataccatttcttttgccatattatccgatttaattatatcccattaaacttgtacttagtgtcctactcattttaacttttaaagtagtttctaatcttgaccatagtatcttggattctgtagcagaaagagatgtccatgatcatttcactatagccttgttctctatgtacgattcagaggtagttgcataaaaccatgtttatgtttaaataatcaagttttcaaaggacattttgtttaaaaggaaaatatgtattcatttcttgttacattatacatatgtaggactacttattttccatccattcaacaaatatttaatgatggccttctaaaggtcaaataccttctcatgtataaatgatattatatttaccacattgcatatagaggccatttttaatatctatacagaaaaatatccatgaccaatatgatcacagtgtattactttttctgttgccacatatatttgctgataattctgatagcattcagtgaccaaactgaagtaaattattgtttccactcttacaagtacaaagaaaatatagtcccattatcagcacctgaaaatagaaactgagactatcaggcaatgaaacttaatcatttaaaaagtatctccagtaattattttcaaacagagaatcatctccttattgaaatgtttactacgaaggacaaatactctaaaacatttctgcaaaaattaactttctaatacagtctaatatagtagacatcctttcacatttttaaatattcccaaaaagttgaataaaggtcagccgcggtagctcacatctgtaataccagcactttgggaggccgaggtaggtggatcacctgacgtcaagtgttcgagaccagccaggccaacatggtgaagccccatctctactacaaatacacaaatgagccaggcgtgctggtgcacacctgtaatcccagctatttgggaggctgaggcaggagaatggcttgaacctggaaggcggaggttgcagtgagctgagatcgtgccattgcactccagcctgggcaacaagagtgaaacgacatctcaaaaaaaaaaaaaaaaaagttgaataagatttcatagtagggtagtctctatgttatattttaaatgcaaatcattttcctgcaatttatatactttccctaatacaggaaaatgaatctcaaattgagctgtgcaataaacccacctaaggaacctttaaaaaataccctggtccccattatagctgggcccgatccctatggattttgatttaattggtctatgatgggacccaagcaacaatattttttaaatgtttctaataattgtaatatgtagctatagttgaataccactaatacagaatatgggctataatttattggtgttaaatttctaaattaaaatttataatattaaaataataatcaaattgtatattataatagtctttttgagtttgttcattcaacaaatatttatcaaccactactattctccagatttttggatggatacttttgtttttcctgcagcatttagtttgctttcagtgaataagactctgaataaaactatttaaatatcactagaaatatgcaggcaagctgaatttacaacccttgcctccaactgtgccttcatgtgagtagcaggagactttctttactttctctgtttcttcctgtcttttaactaaaattccacccaaagacaatccatttcatcatgatatggattttaaatttattttttgcataatttagtattaacaagtttttgatatatatttgaaaagctcctgctatgtttcaggtgctgtggaaacaatcttcctcttaaatgactcacactctcatgtgggcagataagcagagagggcacacacagtgcgtagtgtatgacacagcacacacgatgctctaggagtacatagcagcagataaacacagttaaacaaagacattcactggggaggatcagggaatgtttctccaagaaagtcacatctaacctgagccaagagaagaggggaaagaagatttctggtaaatgagagaatatgtggaaaaactcagaggcatgagagaacatgacctgtcaaaataaaggcagctcaacacgatcgtagcatggaatgagagatgaggccttgctacctctcgctctttactgaatcacagggctcttctgagccagtttaatcagttttctgaagaaaacaaagagccaccaaaaagctcatgcagtatcacattatgatcacacagatcttatatatgtatatagtcagagttgctcagtggaatttgattaaccagttgaatttctttgtaaatatatttgaagttatctactgcttttggaaagaaaataattgatgataggttcattatagcctttcaaacaattatctaacatctaggtcaaagcctaaaaaactagacaacctattttttgtactttggtggttttagttgaagatgttactcttatgtcaagggattcatttttttttaaagtttccatgacagtgtcaattgatgcccttaatgtattttcactacagaaactgaaggtttgaatttgacactcaatagtctttaggtgatgttcaaaataatgagatttgaatttttatgtttttggggtacacatatcttttatttatttattttagttggcaaataaaaattgtacatatttatggtatacaacatgatgttttgatacacacacacacacacacacacacacacacacacattgtgaaatggctaaatcaagcttattaacatatctattacctccacatacatatccttttttttgtgatgagcgcacttaaaatctactctcagcaattttcaagtatatactacattgttattaactgtagtctccatgttttacaataaatctcttgaatttatttctcctgtccaactaaaattttgtatcttttaaccaacatctcccaaatgctcctcccccttccttctccaacacctggtcaccaccaggtgtctattctgtgcttctgtgagttttttagattccacatataagtgagattatgcagtatttgtctctatgtctggcttatttctattattctgaaaaatcactggtatgtcttgtgtctaaaatagtgccaagcatgcagtagacattcagaattttccttgagtgcaagaatgattataaaaagtccagaggctcttcacttttaagatgcatttaatactgagttacaataatcataataaattatggtagctaatatttatggagtgccaacatatgccaagcactatttttagagctcttgcatatattacatcatttaatcttcctaaccattttatgaagtacttttctatcctttacttatggttgaggaaattgaggcacatgtaggttaggggacttgctagggccttataggtaataagtgatgaaattagaattttaacccaggcagctagactcagatccttgtctcttaaccttacactgtacatgaggaatgaaaggcagtggattgacaaccttggagagctattgcataaggcaaataagcaacaaaccagaactgtagcccagtgaaatattaaagagatgatttgatcctctgatcccaaaagagatgtgtcatattttctgcccaaatagtttatatctttcacattatttacagcttcttttctaatggctttgcttttaatacattgcatatgttcattgtttctttttaaagcttttctggaaacgtcacttagttcattttagggaagctttgaaaacatcaatctgctttctcaatacaactaattattattaataataccattgctaaagaatttatttttcaaatgagaactcaaaataatgaactgtctcttgtacaacttctctggcataaatgatcatttatcttcaaaaagaacaaatgagttttcatgaaagcaaatttccaaaatatacacgcgggaaagatcccgtagtcatggctcgatggcttgctgctgctgttgagtgtggcctcctatgtgatgcttttcatcttttgtttacttttggtttcaacttgaacattaatgatttttgtttttccagactattacagaaaaacacaaactaaatgtacctgagacgatgactgaggttcttgatgtttctgatgaagagggtaagacttctattcaatcttctatgacacctgtcatgttcttacacaagggcaaattaccctttttttcagagaccaagctggttatgtggatgacagaatcttaacatttaaagtcactttttcacctttgtttcaatacatttacttttgccatggcagcgggggccgggggcagttctgattagtatatttgtttctggtattatttctttttcctagcattaaaattaatggctattaaataatatgactggaaaaggggaaaaactggaaactggccatgtgttaaaatagctatatgataacacaattgttattaaaatatgtttgaattatgttaaaaaatctttttttattcaaatgactttaagtaaagactttaaagtatactccatcaatgagtgttcttcaattgagaaatctctgtattctggttggttcatatgtacagaatatattttaagcccagaggagaagagccttatagaaggtttaaaaatagtacagcaggaagtagtataaattccacagaagaatgtattatttaagtcagaaaatatcccccctataattttagagttgatgaaaaatgatctcaggcaatggcttcctaagtcctgggaagcctgctttccaaaaaggagcagtggggactgcctggagtgggtgtgtgacattgggctagagctggagatgggccagctggagggtgtccggctccctatctctacttcaactagagtagctgacttttcttcattttgtattttgaacttccatgtaataatccacttggataaaaaaatgtgctactaaaaaatcatgaaagcagcatataaaatttgcaagcatttctttatgagaagatagaaaaaagaaagaaaaaaaatcacgcaaccaagtttcaatagttcagctattggtccaatgaacatgattgaaaaattaccaccatatatgtacatgaaaatgtatgtttgaaaaattattgctattaagaatggcactaggtttaatactcattgcttttatacagagaaatattaaagatgtttctttaggttctttaagataaaatcataagataaaactttacattgagatgtccttatttagaaccaacttgttgaatcacctattggtagtatgtattgagttttctcagcttttataaaaatttatgacaagaatgaacaaatgttggatcaatgtagtattttgagtaaattcaaaggtattcccaaggccagcagttccaaatatttagtataattttgtgttctatcttaatacttgccaactagttctcagcattcctatatgcatatcatattttgttttgtgggatcatctttattatctttacttgtatgttgaacagctcttaaacagtttggtgaccactttattgatggggaggcacttagtgattcaggtacccttagaggatatttttggagtgaaagcttttctttgcttttgatttttcttaactggatagaacaacttgtttaaatctgtgtgcctaatactaatctgtttcttttgaaatagcatgtgtaatatgagtggaattgtatatgtgtgcatttgagtgtgtggattttattaacttagaagcctaaagtcatgaattgtttgtactgttaatgattttgcaactattattgagaactgctaacataattatataatctaatgaacattatataaatatttttccacaactattatcttttcttagaatataaatttagagaaaagtaattcttttgttagttgacattgagctagtgtgaacatgacaataactaagttagaccacttgaaattaatgcagtttatatcactcccttggttgatgatatattttaggtgtgattaaaaatatattaatagttatgtgatttttaatatagctaagaatagaaataaagtaacatttaaaaattatttagggtgaattttgcatataaggaaaaatgagtaatgtaagatattttatctagtaagaggtttccaaagtacacgtggtaccactttaagcaactctattacatgaaaatttaaatttataaatcagataaattgaatagtgattatttaatttaaaaatagccctttatttacaaaataattgctggagaattccattagttaatacatttaaagtatttaatattgagttataaacgaaatttataaaaaatagcctcggccgggcgcggtggctcacgcctgtaatcccagcactttgggaggccgaggcgggcggatcacgaggtcaggagatcgagaccatcccggctaaaacggtgaaaccccgtctctactaaaaatacaaaaaattagccgggcgtagtggcgggcgcctgtagtcccagctacttgggaggctgaggcaggagaatggcgtgaacccgggaggcggagcttgcagtgagccgagatcccgccactgcactccagcctgggcgacagagcgagactccgtctcaaaaaaaaaaaaaaaaaaaatagcctctcagatctgcctattgcattaaatgagataagttataacattctgtactttcattattaaaaatgttatatattaaatattactggtgataagaactcttggtttgtgaagaatattggtgaatgaccaagattatcttttgtggcaagagaagtctatttttagaaatagccaaaacttaatgatatttctttccccgaggaaaattcaagttgaataattttcatgtaaaggatctatttgagtattgataagtaactttttcatggaaaaaattagtgtgaaggaaattagctggttgacattgccaatgccaacactttaatgttttgtgaggttaatatgtttttatgaaacctgctatcatccacgtggacacaatgcagccacatgtatttgaaaattattagctaatccctgttttctctacagtctattgttttattagtagtaatagtgtattgacacccaaaaagagtattcaaactcttgtcattaagaatggcactatgtttaatactaatagcttttaaggagaaatattaaggatgtttctttaggttcttcaagataaaatcataaggtaagactttacattgagatgtccttacattgagatatcctatcaggctaatttgctgtatacacattaaagtaatccataatatccactcatgaatccaattaacaaataatgaatatgatgttattgtgtttcggaaagctctataactgatgccacagtggtcaaaggtgagcatgaggcacacctttaggaagcctatatggagaaataatgtatatattaaaagaagtataatgtaaggcactatgttgtcagtttttcatatccacttggggagatcaggagctagatatacctaacacagtctcatgaacgtgctaagagatgagagattaataacagggcacatagattttagggattagataaggaacagtatgggaaagtcttgagataggaaagtacaagagagagacacagagtggcagaatcctccagtcatttggtctgctgatgcataaaaacataccaggctcagttgtggactgtttgaattcttaactgaaagggaaacacgataccttaaagatttcaattaatgatgaaaacatttaaaactgtttttacaaagatttaaccagcagtggtacatagaaaaagtttattgagaagaacctggaaggaagcagaaatctaagaaaagagaaagcatttactaaatctctataatgctaggtacatgtctcatttaatccttataccatccctgtgacacaggctgtggatatcattccacatatatatatatattttcagttaaggaaaggcttatttttggagaatgaggcctagagacattaagtagtttgttcaatagcacgcagctagtaagtggtgggtgtggaatcaaaacctagtatgaaaactattgtaatagcacagccatgatataaataacatccttatggaggaatatggcagcgaaatgcaaggaaaagacagaaatgggaattcagtctaacagaattatagcatccagatttaaccaaagatgtgaaggtaatcgtctaagtctttgtaggatcgtgagttgatccctgtcttcgctgacttggcttcccagccataaatgatgaggtggggctcagagattttggcatctgtataaccaaaatgcccataggaatgtgactcatgtatgccttattctcatggattcttgagtgggtggcttgtccatatatctctgctagtactctggaatgatgtatactagtaatcaagagaactccagactggctgaatgttgggatgaaatatagaggcgcctcctcctttgaaacactcacttctgttgtgaacacttaacacttagtggggctcttcatctcaggttttagccctttttccatgtctcagcaggaataatgcttgcttgagagggagtgggttccgtaacgtttcagagaatctccttgtcagcatcatgaggggttgtcaggaaggggagccattccacctttttttttttttttttttttgtgatggagtctcactctgtcgcccaggctggagtgcagtggtgtgatcttagctcactgcaacctccatctcccgggttctcctgcctttagctcccagagtagctgtgactacaggtgtatgccaccatgctaatttttgtatttttagtagagactggttttcaccattttggccaggctgctctcgaactcctgacctcagggaattcaccttacttggcctgccaaagtgctgggattacaggcgtgagtcaccacgcccggccgccgttccactttaagttattcccatgctattgtcacccgtgtcctacaggggttaaatataccactcactatcactgaggaatcttgtgttttccgggtatcaaaacatcaattgtacataaaaagcctgcagtacactgatgctttccagttagtagaaaacagttttcacgaaattgcttggaaacattggacaataaaacaacaagaaaaagccaagtcataaacctgggaatcatcattctattaagtgagtaaataggtaacaatcggaaggaagttattccaagtataggaaataataaagaaattcattttaggtttgttctataatgtaaaaactaaaggttgcttttagtttggttttgttttcacattgaataagtaagttgaaaaaaagaaagtgtataatgattctcttaaagctgtctgagttgtacaaaattctttccaagtctaatggcactctattcaaacaaataagagctaaagcttttaatctgaatattattttaaatcatcttttctccccccttggcttgggcaaggaagtagtcgtgctatttgctcatgtagggaattttcaaagagaagcacattgacaaggggagaggtaaagaagatgagttctgctgtggacatgctaaatctgagatgcttatagaaaatttaggtggagaagtccagaaggcaattggaatatagatgcaaaattcatgagagaggtctgggaccaatacagatctgtgtattgttagtggacctctaagtccatgtgataatatgtgaaataagaagaaaaggcagatggaaaatatcaacatttaagagaagtagagacagggaagaaagactcaaaaatatagggggaagaccaggagagatttgtgtcagagaaattaaggagaatagttttacaaagaagaaatcacttctcagccactgattaattgctgaaattagcaagcatctgcttgataagtttgattgttaacaaacaggagtcagagtgtgaaataaagaaggtctaagagtttgggaaagaagctaccatatttcagagatggcagaaatatggatgttttatccatggaaggggaaagacctccatagaatctgtaacagaggagagaaggttgaagatgaagggcctagcagacaatgtatctaggaagttgggaggggatgaggctttggaggcagggatgggccagctttacactagcagaaatcttctcacccaccaagggaagcaagaatatgagtgttatttcaggggctcattaaatacatttaaagctttgatttgtatgcagaattttccagttatagaccaacctgggtaatttttttcaaagtgatttttcacattctgttaatttctacttgctttcactttccatctttcactgctggtatgtattactgaatagcatgatttatatacatctaactgtcttcgagagaaattttatatagcactgacaagattagtccccagagaggtggctttccagctaatgccaacactgggataggatttagacactgctttcagcatttagggactttgcttctttgggtcatttctctctgagacataatcaagacattgactatatacctagggccaccccaggtgtatatgaaaatgctaaaaattcactttaagtagcactgaacctagcagcagccttaggcagatagcatcataacaaaaccatcaaaatgcacaaaataagggagaatgtaaaggacattcacttaggaactcagcgtaatcagaggtggtttttttgtttgtttgtttgcttgtttgttttttgtttttttgagacagggtcttactctgttgcccaggctgtagtgcagtggtgcgatcatggctcactgtagcctcgacttcctgggctcaagcgattctcccacttcagcctcccaagtagctgggaatacaggtgcatgacaccatgacctgctaatttgaaaaaaatttttagtagagatgaggtctaggtgttactcaggctggtttcaaacttctgagctcaagcaatcctcctgcctcggcctcccaaagtgctgggattacaggtgtgaaccactgtacctggccaatcagaagttttaaatttttgtcttgtcaccagagtcataaaattttgatatatttgattaaaaatatattcttcaaatgtctttctattttctaataagattctattcacacgagagaggaaggctgggttcctgtggttgatttgcatgttctacctgatcaaatgctgtgtcttgctccttcagatgtagagtcattccagccagactcttcttttatctttacctttctcaccttttctttcttcacccttataaaccttcctcaccctaccaaggtgtaacaagagggaaagataaatgggagaaataagaaaatttgaaatgtaggacccattttattaaggagttttgtggatttttaaggaccaagaagttaaagcttattttgagttgtatttattccctgtgaccatcttggctgctgagagacagcggtgagaactggcaaattaggagaagcaagatgaaatgcaaaagcaaacagactctgaggagggacaggatgctcgaacctaagtagtattcagaatttggtgctagaattttggggagtaggggtggggtagaagactgggggaaagaaagagtatataagcagacttttttttttttagatgagtctcactctgtcacccaggctggagtgcagtggtgcaatctcggctcactgcaaccttcatctcctgggttcaagcaattctcctgcctcagcctcccaagtagctgggactacaggcatgtgccaccacgcccagctaatttttgtatttttagtagagacagggtttcactatattggtcaggctggtcttgaactcctgacctcaggtgatccacctgcctcagcctcccaaagggttgggattacaggcatgagccactgcagccagccaacttttagtttttaaataatctttttggctttttgcaagggatccataatatgcagcttgcactgtgcttgtattatgtgacagattctgtattaaaccatccccttcaccttttcatgaataagaatagatgtagtctcctgaaatgttaataaaactcatatttttttctgaaagtaatgtaggcttaatcctaaagcagactatgcctgtgttttgataaatctataattagaattcatcttagaagttttttctcctagaagtaaacaacaagggatatccaaacttaatattaaaagaattaaaattcaagtgattacttcttcttggtaagtactaagaaaatgaatcaaatgttgtttctctaagttttagcactgtatagttgtttgctggtgttctgtgttctagtgtgcagtgcagtttcatcaaggtcaaggtaatgatgttgatgcatttcacaatcatgaccatatgttgtagttgatattacattcaagaaataatcctgcttcttcctctgattgtttcaaggtgatgacacaatgactggtgatgggggagaataccttaggcctgaggacctaaaagaactgggtgatgactcactacccagcagtcagttcctggatggtatgaattacctgcgatacagcttggagggaggacgatctgacaggtatctcataaaacttataattgatgtcagccagaagtatgtgcaacatattttttatgatgatgataaaaatgtagatgcaattattgagcatttaataggtaccttattaatctcagcagttagcatgttatgtttttccattgtctaacaactttaagatatgcccattttaaagaacagaaaactgaggcctagaaagatcaaataacttggtaaaatcaaacaactagtaagaagcaaaaccatcataaataagagttctcatcatttaaatgtggcgtttttcatcactggccactttttcctcaaattaaaaggacaattttgccttatagacattcttactgagcggcatcacagacactttggatactcttctgcccccacttttttgttagtaacataatttctgtgaataaagtatgttgtgaggctgaattaaaaagaaatacattcagaacaaaactgcctggaactgactttttcatgaaaaagaatccgaacagaatcccacgagagcctggatacaagaaacaatcggagcaaaatctgagggagcccagtgttaataggcaaatctgggaggtttatataatattctgagatatatgatcagtgctactttttgttattattaactagtacaactggcacttgttatttttttatgcaagttaggtaatgacattctgtggttcctcattgaaattatgactgataagttgggccatgaatatggatgtcatagctgggtgcagtggctgggtgctgagacctgtagtctcagctacttgggaggctgagttggaggatcccttgagccccagaattcaagtccaggctgggcaacatagcaagacactgtctcttgagacagaaaaaaaaaaaaagaaaagaaaagaaagtttgtccacgtagtgtaatgtgttctgctaatcaataatctcaggtttatagttttaaagttggcactattgtaagctattttatgaatatccagcatagagtctaagaaataaataccttaaagtctaagtgaataattagcaaaaacaaacttttcttgggctttttccttgagcaccaatgcccccttccactatctttttttttttctttagcaagataggcttgttaacttcatagtctaatgggatgggagagggcataagctagtggtacacatagagtgccactgaagccctgaggctctagcttcctggagcagatgaaaccaaactgagaccaaataatgagtaacaatggtgaggaaaagtggggagggcatttgaagccttaacaaggtcttgagcaaaggctcgcagggtgtatgagaaaaaagggaatgcagtgttgctggagtgtaagtgtggaggacgggaattatatttgcatagcagggggatccttctgccagtgagaaagaggatgaattttaaaggagagtttcaaagggctaaacctggagattgcagccactctgagaagcaattgttcgtgtattaactgcaggtgtcatgagaggactagcactctaaccttggtgatagtcatggagagaatttcagaaataaaaaatttgagagttttttgagacatgtgtaggaggcaaaactagtcagatttcatgatgaatttcatgatttaggtgaggaaggggaaggagattaaattgagtccttggcttcaataacttagataaagggtgctcccagaaggaggagcccctctggagttccataagctgtcttgatacattggtagatttggaccttatactctgagattcttaaaagatttcaaatttgaataaagtgtaatgttcatggcattgcacaaattgatgataatctatgaacagtcttattactgtcaaccataaagcttctattttttgcatggtctcccttattaagaataagtacttgatttgatctgtttttcttctttcaaagtacttaggttgaggaagaatttagaataatactttctataaaacaggatggatggcttgaatgctcctgcttaaatccaatacttttcagcacataaggtcaggggacatgaaacaaacaagacatactgtgttctccaggtctccacttgcatttctagatcactagatgtattcaccatttccaaaatagagtgacagacagcatctcattttcatggtcttcttttatttttaattttgcttaggcaattcaatataagttaccttttctcagtgaccattttttcctttgcattatttctttatctgaattgctttcactagcaccatgcccaggtaggtattaacagagcatggaaacaagcccttcctagatttatccacatttccctgctcactgctaaacctgcgtgtgtgtgttgccggggcggggggtgagggggagcggtgggggagtgggagggggtgcttatattctagaattatggatttattctaaaataaatatttttatgtattgaactgaataactagctgagctagaagaggtgaatatattattaaaatgtaaatctgtgacatgacccaggtattgctttgtttcaacaatcactgctgcacctgtggttgataacacattagcatggctttccccaaacaaccccaattagcctatgtgtagttggagaagatagaaaaaatattctgatgcctaaaatatgcatagatatggaagaatacaaatacatacaatttaatgtacattaaatacaaatacaaccaagttatgattagttggattttgcatctgttttattttattgtagcttacaaattaaaaatgctttccaaattcaatgtaaaatactaaataataatgaaccacagaagcttcttcatatcttaaagcaaatttattgaaaattgtggatttctactcgttaagtttgccactccattaattgaatgtttaataaatattacagtttaccaagatagtaattattatacttttcaataaaattacactttcataccacctattatgtgtccataaagcagttgtaccgtagtaaaataaaaaatataaactaagaccataacaaaacccctagtacatcccctagatgaacagcaagtaaaactttacacttctatggctatgttattatacatttattaactgaatagcagaaccattgacttcatgaaaaattggcaactgtattggaaaatatttaaacttgtttttaatgtcttaaatcagagtgaacaatttctgatccaagggcttaaattattccagacctttgtcatgctggttatattattttagtgagaataattctttagttattattattttagagggaatattcttttagagcgaataacttctctggtgttggaatagtccatctttatttcatttaagtagattatacgacatcatttttaaaaaagcagttagaaatgatacacattgattaaacaaccaattagtatttcagaaggcagtaagtaagtagaggaggctagaatacaacccatagaaaggtagagacactcctatatatggttttgacttattcattgttgctccctctctctgtccaacttttctcactctctgtgtacatatcctaatatctttctctctctactctaatcaattttttgtgattatatatcactttgtctccttctttcttttcttatccctctgtatttctttcctgttggggttttaggaaagacaaaaaacaccaacacctctctattcctctcagtacaaaaccaattgagagatagactcaggtatcaactaaatggatatcaaaatttcacttgtatgactgatataccgattgcaaagtgcgactttactttcatagcccaatgggctctttaataccacattcctgaaatagacagacttgtctacttagccatagtcactccttgagagtggcaattgagacctgattgattctttcaaagtttagacctttgcaatctggcagccacgtcacaaggttttatttgaggtaccattatttaccattcagtttgttctcattcaagctaaattttcattttccctttgagaccggtgtttctgctattccagaagacggttgagcccatagaacagctgtattagaaacagaagaggttggctcctctactattttcccttccttagccaaattcaaaacaaaataaaggtgaatagaatttaagagttgctgatctagcccgggcatagtggctcacgcctgtaatcccagcactttgggaggccaaggtgggcggatcacgaggtcaggagatcgagaccatcctggctaacacggtgaaaccctgtctctactaaaaatacaaaaaaattagccaggcgtggtggcaggcgcctgtagtcccagctactcgggaggctgaggcaggagaatggtgaacctgggaggcggagcttgcactgagccacgatcgcgccactgcactccagcctgggtgacagagcgagactccgtctcaaaaaaaaaaaaaaaaaaaaaaaaagaattgctgatctcgtgccacctggtacaaaacacatccaagtggatcttagctatctttgtgatttacagcaggaaaacaaattatccattccaccagctgagacaagcttttgctgagattaacccttttcccaataatctaatcccctatcaaaagctaaatgtaaaaccatctgtaatataagtagcctccaattgctggagctaaaactcttgttgatgaaattactaaggctctgtcaagagcctcaatcttctccaagagcctacataacataaaatagttaattctcaggttatatttagattttgttttattgtaaacacagatttatgtatgtgttaacgcaaggatcagacaatcaactctttttattcatgtcatttaccctttaagactttttttggaatatacctacatgtaaaataagaaggagaaggtcctggattactatgaattacctacaaagtgatgatttcctcaaagacaattgatgcgggctatgttgacacctcatagatatgatagtacatggcttacaaaattaaatatacttgcaaaatgaagatagtttctactaataaatatgctaatttaacatttagtccataattctacagtgcttcactggccaaacacctactagctaaaagtaaatgaaagtttgcttctataaatattgtgaaagcttgcgtatctcctttttttcccttatgggctttgggctaatattttgaacacagatctttaatacttgagctacagtgtataaaatatagcttatttaagataccaatctgtcatttgattttacaaattgatttaaaaggaatgagattgcatctatgcaaatgtcaagttttacctattacatatgagtgtgtaatttagaactttgaagttcagatttttcaaaaatgtaatgcatggtttatcaaggcctaaatcccattttgaagccaaacctcatttttggtcagtggccattggcaatttgtctttgtgctggcaggtgtgtctgtgttctgggctggagcttagatacagtttcttgtgctcatgcatctcatcaccacggcaaccaacactctggtgcttcagtcaccacacacaggacatgcaaaggggacagtgctctcgtttgaaataatagcattgttggagtcactagagacaaacaagaggaactccacttccgcaggaagcatgcatctggccacagttcatttcactctgtaccttccaggggaatgcaccaacattcagtcattcacagtttagagaggaggagaaagaggcatagagagagaatggaaaataataagcgaaaatgaaactgggctttcattttgttcttctctctgagggccatctactttcctccttatatttttcttagttgcagagagattaacatttaacacagatttaagcaatctatcctggaattatttcctgagtgaatttctggtactggcagtaataaactacagttgctggtttcaaacatttctgggaagaaaatgaatcagattaggagtatcaaattttaacttctggattcccttgtgctcttgccattgagcggtaggaacctgtcaaaggatgtgttagttcagctgttggacaaaaaggtaggacaacagagacttgtgtccccctggaagttgtgctgttagctaatagcacgcttttttcactctcctgctcggctcatcattttgtcatcccaaccctgctactgctgttggtatatgccatggcctcctgccaacctaccagccttcgatccttcagttccgacaggtctcacactctgagccatgcctcctacctgagggacagtgccgtgatggatgactcagttgtgattcccagtcaccaggtatgtgacattttgccttcatgtctttgctttctggagagctttgtaacattattggatgctagaaatgtcctgagaaagtttttaatccccccaaaatcattcccaattcagttgagaagctaggataagagatttgagggttttcctaaaacatgaaaaatgttcactagattttttcaatgagcagtgtttttctgaaaaagcatactgcttatttcttcagctatactgaattcttctgtggagattatatatgaacattatatttttaaaataaaatctccattaaaggaaaaagtgaagtaggatgcatttaaggtataagatgaatggtacaggttaagttatatctttcaatatttaaaattgttagctatgagaaaggcttaaaatttattctggaatattttaattttagttatgattttatcacttttggtggattgggtatagggaaatagatggatacctactgtcttcaaagacaattacacgaatgtaatcttatataatctatttaaataatgcagtttaaaagagaatgcattttaaaagattcattgtaaatacattggttttatattttaagtgtaagtttttctaggttataccactttccagtgatgacactttttatattttgttatattttactttaattgaagcaaagtgtgtttattcaatccagtgttctttgtgtttaggtgtcaactctagccaaggaggcagaaaggaattcttatcgcctaagctggggcactgagaacttagacaacgtggctctttcttctagtcctattcattcagggtgagtaaatcaatattatgtatcctgatcaagaggtaaaaagagatgggagtgaaaacaacagctttgtccagtagctttagctggtggctagctttacagtggaggtgccctttgtttaaacttgtaaataacattgctttatccaacatggactctatatctacaacaacaaaccagcaaaaaagattgaattcagcattaaaaaaactgactattgttttaaaacaactagtagaattgcgtcaaacagcttgctacctaactggaatatactagtggccttcctactattcacgtactgtctttaagacatcctaaaaagaggggctgaatcatgtgatttctagaaagtttctatttattaggattagctgattggttcaatgaaataaatgcctttctcagatgctaatgcatttcaaataatgttacagaagcttgaatcacacaaatatatagaggagtttatatattgtttgaagtagggatataaacaaaaagggaatttgaacgcaatcagtcaggttctcagttatctttttaaagtcattcagagagtatacacaccactgttgaagcaatgctgcctgtttttattaactcattaaaaaataggagtttgagtcatactttcaaacatacttaaagttgttcttaaggtgttcagttatgtggaatataaattctttaaggagttttaaattgtaacactcttccaatttcttccttacatattagtagtttgcaataatatagtaatatcataattatatataaaatttctattttttatttaattatttttaaagccctatttatatgctatatatcaaaatgcaatattttgattttaattattatccccaaatccttatccataaatcccagaactatttggaaaagtagatcctttcttatttttattattctaaaatattctttattcaggaaagagttccaacatattttagttaaaaattttagacttcttcaactaatcttatactaagtaaaggttcatacaataacataagttatatagttattgaaaacaatcctaatacttttttccttgttaaataagtagaggctagttcctaatgcgacagttattcatgagaataaaaaacaaattacacttcattcaaatttacttgcttttttaaaaaaagaaagctatagattactaaaaagatacaacattgcattctgctaatgaacttcttcacagtggtaagaaggaaaaagacctggatgtagagtattgtaggatcatagataagaatctagaaatcataatgaggtgtttaaagttcatatgcagcctacaaagtgatgagatggttttaggtaaaatgtaattgactaataataactgaatttacacaagaatctgtgcatgccaatacttcagtttgcaaaataaatcatttatattttgaaaaaggaacttttaaaagaagttctttcattactgaagggcagtaaagtagtctaagtacctcaattacaccccaattatgtacaactagatacacctataagtaattatggtgcactacttatgatgaaccaacagcatccagtagttaaagatgaattatgtgttaagataaagatctttaaattcatagtctttaataaaacagttttcctatgaatctcaagcatttaatactgactctggataattctcaacttttgctgtgcattagaatcacctaggagctttaaaaaatactagtgctggccaggcgcagtggctcacgcctataatcccagcactctgggaggacgaggtggacggatcatgaggtcaggggtttgagacaagcctgaacaacatggtgaaacctcatctctactaaaaatacaaaaattagccgggcgtggtggtggtgcacacctgtaatcccagctactcaggagggtgaggcagaagaatcatttgaacccgggaggtggtggttacagcgagcctagactgcaccactgctctccagcctgggtgacagagtgagactccatctccaaaaaaaacaaaaacaaaaacaaaaaaaactagtgcccaggcctcaacccagaccaattatttggaggcctggcattgatactgtctacaagcgccaatagtacagttgttttatatataaactgttaggaaaaactttgcttaataaggctttggttattagagagacctggttaattaaggtatacctagttctctcaaatgttctttatttcttccattcacttatgtattcattcttcacacatttgtgtaattctataaagtacctgacattgtgccaggtactaagaaaaaagctaagtaacatctagcctctgcctttagaaacacactctatgttgttatttaaagttagaagacacttaatctgtaaagagagagaaacatcgtggttaatagtgtgcttgggagtcagacctgtcagaattaaatcctgacactgacactcgtatgtgacatcaggcacagttatataaaaatctctgagtttcagtttccatatctataagatgagtgttatattattgatcccataggggagctttaatagctaattactttttaaataattagcactttgcctggaaataataagtgctcaatagattatagctattagtatttgtacaatccccatatacacatgttctagatctttcacaaattgcaaatccattaaggaaaatgtattatgactcctctaaatggcagcgtcaatgtggttcaattcacaatagtaacgtttgacttactgttatttttattcaggcaaattattctctattagcgtctccagtgtttcaacaaacacaatgcatttgatgactctaacagaatgagttattactattgaaaactcaatgattctcagtttcctggtatttgaaagctaccatgatattaatgtatatgagtaacactcatcataccatgtcatgtagcaagagttttttgtaattttattcattatacaccaggttcctaaatagtagcttttatttattttttttgaagaacttagtttttctttaattaattgggtggattcttaagccacttcaagttctacccaaaatgtaaggaaaaaaaaaggagacgaagtcttactctgtcacccaggctggagtgtggtggcacaatctcagctcactgcaacctccacctcccgggttcaagtgattctcctgcctcagcctcctgagtagctggtactacaggtgtgcaccaccatgcccagctaattttttgtatttttggtagagacagggttcgccagttagccaggctggtctggaatacctgacctcaggtgattcacctgccttggcctcccaaagtgttgggtttataggcgtgaaccaccgtgcccagccaaaaaacagatattttgatagaggtgataataaagttagttttttatgcacatgccactgatttgtacatataatgttctcttaaatttaataaagggattttacattaatagaagacaccgtttctaccaataagcagtattggtgattttattttacctctattttatgtttccagtgactaatgttcataactagagaacaataggtatcagtgattaaaaaatcagtatcagtgattaaaaaatcagtatcagtattaaaaaatctgttctgctcaatacacacagcaaatacctggcaaaagaaagactaacatttgctgtttattttaaagtgttgtcttcagattcacaatgactctaatcaacagttatttctagcatcctagtcatgatcataacaacataatcttgggcaagaattttaattttacaattcttcttcatttcataagtgcataaggaattagaagatgtaagacacaactcttagcagtagctagctttgtaagtcttcttaaatattgttattaaaggtctttagtttttgtagtgttttaattacagtcaaatgccaacaattaaatgtcaattcattaaaatgtcctacacagtcatacattaactggaggtctgtaaggttgtcttttaaagaacttcttttcataaaaacatgttgaaggcaattttgttgtttacctaaaatttctccaaaaataaagtctattttaaaaatcatcttgaaggtattctctcaaataacgggatatttgaaatgcaaggaagtcaaggctctcacttgacaatattaatgtttatctaatatgtacggcagttaagttagttattcatgtatttcacaacagcctagggttttttttagatacgtgaaggtaaattcttttagatgaggaaagttttttcataataagtagcaaaacaagtgtttagtaaggttggatttccggtccattaagcatgtatacttttgtatgtcattagggttgaaaacacaagagaatcttgtgaaagcttatggagggttttacggaagagcagactcataggtagaagaagagtgaaaggtagaactataatgtgggattagacattatgaccactgaggaagacagcaatctccaaagcaggaaatgaagtattgacaaaagcaccaagactttgtttgcatagcttttttttgcgatactctagtaggtaattgatattacctaccccgctttatagtttatgctactgtttgttgttgatctatactttaaattgtgccttttctttttgcatttcttctgtgatagcccaaaaagttattatcattatttttaaagtattaaatgtataaaacaaaaacctttgcgtcaaaactgtgtccatcaaatcaaagactttatgtttttcatcataatgacccttgatgtttctgtagcttcttggacactcagactttgttaaacgccctcataagccaatgttgaccaaggttaaaaacccatatccagtgattttataatatccccagttctctaaactgggagttgccacaaagcccccataacttgctcttctcgacctatatctcatttggatttccatttgttttcaatgaataaggtattggtgtataaataataagtcacttctgagttccttccttatatttcactttatccgttccttctctgtgctaaagtatctattctgttgcagccgcgcctctccatgtcttgaacgtgacaacagcaggtgaactactgcataattctttctctgaacatgttgcctattcctctccccctttcgccatctccttctgcatattccttgcctcaggatgctttagtgtgaagatacctagccaaagagatagaaagattgatgttctccaaattgtggctattgctgaattcccctttctctgtgatgaagagaaagtggtatttttaatttcagtggaaataaagtggggctgttccagacttactgtggactgcctgtcttggtcatgggtctccacatctccagcttcttttgtgagaaaaagtgctacatagagatgaaaaatgttgttccctacaattatgcaaattggtcaagctattttagggttttattaaaggttatgattttaagtggcacttagcagagagttttttgttgttctgggttttattttaaataccatattctaggtgaggcaaaggctgaaagtgtattagtagtgcatttccttgctagtactgctataaatgcaaccttttgatattttagaaattgtactgtagcatgactagtcagtgttctaaaaatacctgttattctgttatttatttaaagttatttttaaaggttcctattagactgctaattatagtatttttattatacagccatccattatggtactacaaattatcagtctacaaaaaagacagttttgtgtttttatttttgaaaacttttatatacatccttatactttttctcaaatgcacgctattgtctttccatacgtgaacacagtggttgataaataattgtttggtgattttaaaaaatttgaaccacttttttcaaagccatatccaagcaatttttaagtttatagaatttggagaattaggaaggaattaagggaattacagaggagaaagagctcatgcaatggtttgtctcacagtacctcagaaatcggatttaatctgaggccctcttgctatgtatatgaggatcactgaagcactctgatgattttttttcctgttctttcaactaactctgaatgctgcaatttcctccccattcccatcccatggtcctcaaagaattaaaaataaaactaaaggaatagtaactttgggggtggaggatgtagtcctcaaatgactggatcatggttttctcctgcctcctctgaagcatgtactgtttagctaatcaaattgtgtatttgtaggcaagtcatctgcataataatggttgcttttgcttttattctttttaaattgtgataacattgtatctcacaatttagaaaacttcaacaagagtttctactttgcatgattgctgaatttcatttggagagtaagagatgcaattaaagctgagtgttaacatgatattttttgtatgtacagtcttaagtcaatgtttagtgcagtgtgtgtacacattttctgcaaaacagctgttttaaccataaagcaaaaatgatatatatttcctgaagtaatagcagtttattttccaattaagaattctttcagagcatctgaaatgaaaggtttaagtaggtttcctaacctagttaacagtaaactgtgcatataattttaatactggaaggcaacttagagtctatttagtataagtctcccattttatggataagaaaactgaaatctaaagatgttaagtgacttacctgaggttacaacattaattcaagatagagatataactagacccagggaagagcatggtacttgctgcattctcctgtgctgtgtgataatagtatttttatatcttatttaagtaaacttcataaactaataaaaacttcatcatcattttaaactacttagcatagttccaggttcattgtaggtactcaataaaggttagtttctccatttatttttcaagtggtatattgtattgtgtttaagatatttaaaatatgtaaaatcccgtaagtgtagagaaaggaagatgatgggaacaagcatttattgaattccgtatgctttacccacacaagatttctcactgtaaccttaagtggtaacaggattatttttcattgccaggtgaggcttcaatcttaaagatcatagatgacaggcagagccatcaatccatattactgcctcctctaaacatatttaattatatgtttttacttaagttattttcatctccaaatgtttatggggattatcttgtcccatttttaatctcctgcaaacatgagaaaaatcacattgattcagtcaactccagtatgtgaacgactcatctcgcgactcacaccttctaacctttctcatttccctgtggtacataaaagtacgtttgcttacaattttttttatgcttatttgcagttgttttttacgtggtagaatacctgtctcctaactctactacctgtccaaatagtggcacttttgggtattctaatatttttaatgaaaatgctcagatgcttacccaattttatattatcaactgttgggattcactgataagcatacctattgtcaatagacttttcatcagcacctagctataaacttgagttatttttcctgttccttcttatttaaagaaaagacttcttttattatgcaattctgtaaattcagcatttttatcagttgtttggcaattccattatttgagtctaatttgtttagagtattttcttgctagattttataaacagttttactcattttgactattaatatttagcttttttatatcttccaatatttttatttctttcttgacatctttctgttttactttcttctctctcttctctttctcttctaaagaaaatttcctcactacaacttggtgggtttttttggtttgtgtttcttcctttagttacttgataaaaacacgaaggcttgttttctttaaaaatttaatttaggccaggcacagtagctcatacctgtaatcccagcactttggaactccaaggcaggaggattgcttgagcctaggagttcaaaaccagcctgagcaacatagggagaccccatctctgaaaacaaacaaacaaacattagccaggtgcaatgatgctgcctgtattcccagctacttgggaggctaacatgggaggatcacttgagccccgaaggtcaaggttacggtgtgctatgatagcaccactacactccagcctgggtaatagagtaagaccctctctcaaggaaaaaaaaattgttttttctctgaattatgcatactggcacctgaatttttccaatttgctttggatttttgtgcaatacttaaatattactttccaggtttacaatgacacagagatacttataggtaaatttatctgcttgcagcttcaggctttaaagtgctattattttgattttcccatctttggtctttcttcatataattttaacttctattaaaatggtttattttgttaaattcaaacttctggtttttgcttactctcattttctactagtcctctatcaaaggaaatcaatgtattaggtctctctatatacattagagcaggaataagcctgtaggagaatatttaacattcaggagagtcgttcccaactgctttcctacatctgaatatagtgattcgaatgaattctgactgctctgattgtccagagactaaagaattaaatttcctcctatgttagccttagacataaatatatacagctcctcacgtcttgcccttttcactaggttgtacattcgcttattcaacagttatttattgactgcctgctaagtgctccatccacactgtgccaggctctagaggacacaggaagaaatatggagaacatgttcactgttattatggcacttttatggctcctatgtgtggacttagtcatttctcagtgaccaggaaagtaagcagttccaagtaatgacgaaaccatcatgtgacatctggggcttacaccatgtactttgtggcagcagctgctatgtctttactttctgtatcctcagttcttagcagggcacttgacacttaataggagggtaacaaatgttgcattgaaaggagcatagaaacggaactatagagcaagtgagaacaaaaagagagtttcaagagacacagtcaatgacacaatcagggcaagtaatctaacctgtagttacttaaacattgttacagtcaggaacttagctacttcaattcactctttagagaatgggccaccagaagatactctacatgttcttccatcgaggctccatgttatataggccataagccatcactggaataaatgtagtggagaggttatagcacacaacatgagcgtggaaacttactaaatgccttcaaaggtataaatagtactgaggattgataacattaagcaggtgtattataataattccttactagtttgagttcctgtctgtgcaccaatggaggcagcaaccaaaagatgaaaaaaaaaacaaaggaaatattaatcttaattatcagtgagtcaaaaatattgcaatgaatttggaagtagcactagttgaaacttgtcactttttgctactttttcacaaaaaccaacctaagtatcctactcaaataagaacaataaaatggaaaggaaaactttacatctgtctagaagtgttaccagtattttcattcttttgagcaacaaatagttcatttaaaagtcaaataaaaaaaattttaaagaattcatactggaagactagtaataagaaaagtggcaaatattttctcattatgttttggtaaagaccagaaacatcaacacttcagtactgaactgttgattgtacttcccagtttttactccttcctgaaaactttaagcgggctaggtatgaatggaaggtctagcctggcccctgcatgtgggaaggcctgtgctgcctcttgtggtctcatcctgcatgacatgcttcagacaggcactctgggctccttcgcacccatttttattactagcaacaggatttctgtttaatagcatgtttaatgagttctgtgttccgctttgaagaagatgctaagatatttttcttcatttatctaaaaataacataaatgttttgtgtttatatcccataacttactttgataaaatacctttcaaatgttttaaatgtcgtggaggcaatatctaggtgggacaaatccagttggttctgtgctgagcagattataagcagagacatgatacacctgtatgttgctttcctcttcccattttggtgtaaagatcttgcaaatgcaatgaaaatttgaaaagacactaatgtaatttgtgaaagagagtacacacagtttgtatgtctttgtatacgtatacacaacacttagattgctgtgttgtttaatttttgctcctcgacacagtaagtgcctgggagactttaatgagtgttaataccaaccaaatgacaagcattcaaattaacctggatcaggatctgctaagaccatcccaaaggaaacaacttcaaagttaagacaaacccgttctcttggtacacttaaagaaaccaagtcatcttggattatagttctcctttttcatgaacaattaacctagaagaaaaggagaaaaattaatagggatgctgttaacatttctaaattattagctataattttttacattcaatttattacaatttgagaaaaatcatgatacagatgatacagatatcttccagcagcatgagcccagggtttcccactcctgaaatttcacttcaaaaatggtgtatgggcgggcctacttgttccctatccacctgctgttcatttcaattagaatggtatggcagagagattcctactcaataagttaaaaagtacattttaaccagcaaattaaattagttcaattcaaaagatttaattattttgcatttctcctcctttagaatataatcagttaaaaatctacatcctgggtaagatgatgttggaacaggatgcagaaaaactgcaatttggtctttcctctctgctttgtccttgtattatttcaacatgtagattttttaggatgtacacataaggaagcagaagtctttccatttataacaaaaggaaacttgtcaattgttctttatgtaatttcattccattttccttcaaaatcaattaggcttatttttaatttacagtttatattgaacatcaccattgtcagcaaaaattagaattattctttacagattaaaataatataaaaattagaacaacaacaaaacagaattaaaggcattggtataaagtaaaataacttttaaaaacaagcattttaccaccatgcatttaaataaaaaagagagattttgagacaaagcattacgaaaaacaacttgacaaagcttgttcatctgcccccaatatttcaaaacatatctaatcttctattttaatttttagtttcctggttagttttatggtggatgcccgaggtggtgctatgcgaggatgcagacacaatgggctccgaatcattattccacctcggaaatgtactgctccaacgcgagtcacctgccgactggtcaagcgccacagactggcaacaatgcctccaatggtggaaggagaaggcctggccagtcgcctgatcgaagttggaccttctggtgctcagttccttgggtaagggtttctgataaacctcccacttagtcatcgatgagcttgtgtcctctacatgaaatcactaggatggaatggaaaaaggtacgtcaaaccattttgaaagaggatcagcaccaatgacatttttaaaattggaagtagcacctcaatgcttgactccacttacacgcctcttattttaaggcattaatgagttaaacattcaggttgaataccacttcttctttttggatgttaataatagctgccagacccccaatgtgaataaccagtattttagccgatggtaggtattattttctcatctgagaattaagtggtaaagtcacaaagaaaaaattctgctctgttccaagcataaatgtaaattctcatacagttatgaaacagaatcattatctttactttggaaagcaatgttgcctttacagaatacctacaaatttaatcaatgtgatttttttttcagctatcaaaattgctaccttgagccttatcattacattggctatttagtcacagtttatattaagacaaatacatcaagactagcttccaccgtgctcgttttggcaattttgagcagaatttagcatttcttctttcttctgtttgtttgtacggctgctgttatattaagtggcatttcattgtgccaagaaatgaatagctacagctgaaattaacaaaaggatgaagttttggagggggacaagtttcaaaatattttgaaacaaatcaattgtatttaagtcttggtgcttgaaatactgggagaaaatcctaataatcgtgaactcttttactttgccgatgtcatattgggaagaggatttcttgctttagaactcaggaaatgttctaaagctttgtaatttggaccaaactattagcagattgctccaaattatgttcacacctgaaaaggggtgtgtttatatttcccaattatagcaaccacttctcatgtcctccagtcagacagaccagagctttacaaggagcctgtgaagttctgggttgcatcagaaaatgccattatgtttggagtaattccccaatgattcttttcatattctgtgtcagaccctgttcccctcgtgctcagatagtttaggctttttaataatcttcagatctgttggggaatatgcatgaaaacatctggcctctgtacagggcagagttttcattatattcccaacagcttgtctttcttgtggagcattttttccccctttttggctagtgccctggcggtgaacctaattagggacagaccggacagctaagtgctctccttgcacagacgcgcctccattgtacactctgggtctcggttccttgctctttgtgaccaatggagggggcagaaccaaacgcagtgtgaaaccaaagttcaccctgtggatcagctggcgacgctggggttctgtggaagacaatacctgaagcttacctatgttctttctttcactgctgctttggatgtactcagtaaacttcacctgccaacggctcctcccccacttaatgagggagaaagtttggtcagccgcattcttcagctggggcctcctggaaccaaattccttgggtaggagtgacttaaaacaaattgatggctgctggccccccattcttctccttcttctgcaatatgatttctcttttttgtcattgtgcccatgacatgtccctttctatgatttaaattctgtataacctatctttagtggaccatttctgacccttgtggtatgtgacttttatttttgagtgatgtttttatatctttccccttaaagtgctgtgaccttcattttcgtttaagcatgagatctgcctagttgtactatgtgctagttatgatgttgttatgatgaatttggagtctgtatcaaagcaacctggacccaaaaatcaaaaccctctacatattttgagaacgaatgtgacctaaaaataatagggcagtgcatgttccggatcctgaatataataggcattggacacaattgggctgtctgctgaggggctcaattagggccacactgtgtacacatgcctattgtttccttgaatgaagaaaatataagcaaaaaccacgagtgcatggctctttagttcacaagtagtcaactttctgacatctcctcatttacgacacatcaaattatgcaatgtgtgagccattttcctcttaaaccatttcgtcattttgcaccttgtcgaaaatgttttaggagattggcagacatcatagatatgcatgtacatttcttttggttaaatgtgttctacttacatttatcaaaggagaagttccagaatgtcacatgcactcacagggaaacattatttggcttaaggtagcagcatgtacctgaggattggtgcccctgaggtggagtgctactgtgtgaccatctgctagccagtgggctccaggggatggcccactatgtccctgtccccagcaaaagaagaattccaggtcactttgcaacagagtcgaggtgcttgtcttgctgttagttagctcctgtccacactgaatgttctgcattgctatgtcaggcctgtgatcgtggagatccctcactttgcggcccttcgaggaaaggaaagggaactggtggtcctgcgcagtgagaatggggacagctggaaagagcatttctgtgactacactgaagatgaattgaatgaaattcttaacggcatggatgaaggtactttcagatgaagcgttttaaaagaaatctaaactggaagcatgaaaatgattcatttctttcttatgacctaggggtgtgtgtatatgtgtgtgtgtgtgtgtgtgtgtgtgtgtgtgtcccttgtggtattttactacagcaggtaatctgctttgctcctgtagtgatgagttggaatgcacaatacttttgcttaattttactcctgttacattcaggaaaataaaagccttgaagatatcaaacatctcattaaagagatgcagcatgcttccatttttagtgtaaacttttttgagccgaaaatgagatagaatagatattgttgcttcataacgaaatgaactgatactggataataaatccatgatttaaaacaatgcctaacttgaaacattagatatttaagatactgataaaaagtgttaagctactgtgttggaaaacttacatctacccataattagtaagttatagaatactataatttttaaactattattaagggggtaggaaaattaagttcattcaatttcctacctataattcaaacagggagttagccagggttgaattgcatacacatacatacacatctagtttaggaacttagttttccattagaacttcaattgctgtaaatctcaactctgtcttggactgcacaaggttgtaatatctcagtatgaaaagaggaaagcggctcttcctcaggtctccatagtttgcacagagaaaaggtcctagacctaatagtagaattcacattcaactttaagtaactacacaaatagggcaagttctttgcctgcatgccaggaacataccaagttttgtatacagctagacactcaagagcaagtatagctgtttatcaagttcttgagtcttctggcactagtttcagatatggcttatggataggaaagagtagcctgaccatcgcttctttaccatttctttctacatcctaccacggtttgaataagaatagaggccaggcttatcttatccaaggggtggatggaggaagaaattatgccctctagatatgttaagtcaatatcttctaagcaaagaaaaaaatcagggtttttattaataaaaattgttccctacaatatttagctgcttctacttcttggaaccattccttttgctgacatttaggtttaggatattttcctctgagatatttacctatcaatgacactgccagtgagcattggtatcttgcccttggatggggacccactctttaactttatttatttaaaaatgagctttttacatgggtattaatagaaagttaatagattaattaatctattactagaaagttaatagattaattaatctattactagaaagttaatagattaattaatctattactagaaagttaatagattaattaatctattactagaaggttaatagattaattaatctattactagaaagttaatagattaattaatctattactagaaagttaatagattaattaatctattactagaaagttaatagattaattaatctattactagaaagttaatagattaattaatctattactagaaagttaatagattaattaatctattactagaaagttaatagattaattaatctattactagaaagttaaagatttgtgtatgtctggaaattttaaaaataaatataggctagtatttgccagtgcatcagtcttcaatcatgtggaatcagatcctgggactttttacttttactatctagctatgcccaataatcaagaaaaacgtagttgctgttcctgcctctataatgaattgtaaatgatttctaaaaatgaacaactttccatcacctcttaaaattcagtgatctatatagtgcacattttctaaatttaaactagtttgattttttttgtattgccctgaatatctacactaatgcaatttataaagaacccatgatcccatcctcttgatgttaaatgttatttttggaaatttaatggcatcaggggaatattgaaaccctgaattcctaatcactgattttttaatatccacagtgagtacctcagacacaacccttccactggagtaaactcataaacatgactcttactcttccaagatagattttattcctgcattattcccctgaaaacccaaagggctatgttacttcttaaaaccacaataacttggatttgagctaactttgaaatttgcaaagaaaaggagcccagaaacaacttcctttccatcacatgaaccaggaatagaacacgttcatttcattccatatttgccctcatgcctctcatttcaaaggtggccctgcaatgctgcacctagaactaaatgtttatctttctcagtgacctggaaagtcactgagaagaaaggaaacatgcaagctaaatgctgacagatcttgaaatattgcaattttttgttttctggtgttgttaggatagccttgctttttaaaattgtcctgttgtttcaaaaaaatgtgttttgctggcacttctgttcattattaaccgagcgaatgagttggctagaatgctgttagaaggaaatctttgctatgtgaatgaaggtgggtcatttcttgtcttagtactggatagcccagaagacctagaaaagaaacgaatctgccgcatcatcacccgagacttcccacagtactttgcagtggtgtctcgtatcaaacaggacagcaatctgattggcccagaaggaggtgtactgagcagcacagtggtgccccaggtgcaggccgtcttcccagagggggcactcaccaagcggatccgcgtaggcctgcaggtatgcccatgttagatgcaaatgatcctaacaggattgtattctaatgattaaaaattagctttgtcaaggactgttacctttgttttataatcacaccaaaaaggaaggtagcattaatggtaaagctaaagtcaaaatccatatttattggttactaatctatttaaaaattcaacttatatttggacaattaaccaaaattaatctccagctacaaatgttttcttcttgtaaaaaaaaaaaaaagaaattagcttttaaatgagaaataaattgttaaagaatcagattattcctagtaagcaagagctgccatcagagatcgtggatcttacaaaattttatgagtgcttagtaataatactgaacttatgattgccatatttgaagcccaccaaacttatttgtaagataaaaaatactttggggaagaaatttgaaattaagtataatgattcattctttattttaaaatatatacacaaatatatatgtgtgtgtttttactttgaaaaggctcaacctatgcacagtgagctggttaagaagatcctaggcaacaaagctaccttcagccctatagtcactttggaacctagaagaagaaaattccacaaaccaattaccatgaccattcctgtccccaaagcttcaagtgatgtcatgttgaatggttttgggggagatgcaccaaccttaagattactatgcagcataacaggtgagtcacatatgactgtgttcgtagagagttctgaaaaaagaaacttagatcgttgtaaatattaaattacctttgtcataagatgtctgcagggtcatatgcattaattcagggaatacattttaattaactagggaaatgaaaggtgaaaggaaacaactattatttactaaatgaagtctgtatgccaaactgttagatagtttatatgcgttgtcattctaatctccacagtaaccctgtgaggaaactttaaccccgtgttgctgagaaggaaaccatggttgaaagaagttctataacttgcactataaatatttggtggtgttgggattcaaaaccacacccatatgtctccaaagttcaggcttcaagccttcattgaagagatcactaaatctgctgggaaaaaaaatactgtcttgagtaattatacccaatagttcaaaccaaactgttatgttatggaattggttatgtctttatcattgatctattgaactaactttagaaaaacaacttaaaggttttcagtgattaactgatttttggtcttttcaattgtggttgtgtagtcgctttcagacagctaccaaactctccaaagacactcccagaacgttggtagtctcttcataacaatgccatcacaaatagtgagaggcaaaaaaattcacatgaataatctgttctagggctaaataatttaactgataatttctctatcaataattacatggtgttggtattcagtaaatattagtactattattagtaggaacagtaatcatccctggatgtttttgtattgttagaattattattttcatttctctttcatattggcagaatgttcacctttattttgttttctttaattcacccttcttactcgtatgtttcttgtagttatgatagagaaccacgagattattccataagtttaataataatgagtggggggaaatcatatgcttcacttatgatctctttcccagttgctcatttttggttattgctatcatttctgggtatctttcccataattccagccccgtagatatatgattaaccttctataatgtgcaatataatgtcatggatgtgaaataggtgaggcagaagaatatctgtgatacgctctgcccttatagtgattaaataaacactctaggggcctaaacaccatctactctatttattccagcacaatgtctttagacaggtttctcataaacatttctgaaatttaattaaaattattttaaaaattaacaaataatttaatgtattaattgtttaaatacctagatatttgagtctttgtatttttctgtgtcatgtagttatgctgagtatgtattttaaaggcctactagaataaacttccataaactttctttgataacttgttctcttctttaagaaactttagagtcaagacttttcttcatttcaaacatatattcctcctacagccctttgaactaaaattttgtccttatctatgtgatcttaatttctcagtagacatgaaagacaggtagtcaccattagccttcatggtagtttttcaatgtacaggggccatcctttgatattcatttattttttcatttaccttgcaatatttattgagctcttactatttcacaaacattttttggctaaacttttattgcacatcgagaggaacttttttgaaaacaatttcataaaatatgaagtttaagaacaaaagaatatttagattgttcacttttttttttttttttttttttttgagacggagtcttgctctgtcgcccaggctggagtgcagtggcacaatctcggctcactgcaagctccacctcctgggttcacgccattctcctgcctcagcctccctagtagctgggactacaggtgcccaccactatgcccggctaattttttgtatttttagtagagatggggtttcaccgtgttagccaggatggtcttgatctcctgaccttgtgacccgcccacctcagcctcccaaagtgctgggattacaggcatgagtcaccgcgcccggccgattgttcactgttttaacaaactgttcagctccttaggtggtcaaaggatatttaaaaataatcagctgtatacaattcaaaattatcttcagagccttgcaattataataaaagcttcagaatgtcaggaagagaacagaaggcttaataaacacttattcaaataactaccctaaaacttagtttcttgagtggtagtctgctgtttgttttcagtgtgtcattttttagcatgtagattttagtcattttgttttcaatgtgccattttgaggggtgggatttggcttgtgaacacagaaccacaaagactttattttagaatctagagtctggagttttgcctgatttttttcaacaatcatattatttcaggtggaaccacccctgcccagtgggaagatattacaggaactacgccattaacatttgtcaatgaatgtgtttcctttacaacaaacgtgtctgccaggtatcgttatatagcacagaaaagcccactatgatatgttaccctccaaaaaaactgccctttgttttattttgtttctttattgtttaaaagttattttttcattggattttaaatatggtctgcctttgcttttatattttaaactagatctgtcagcaagtggaatagtgataatacagtaacaaagtattaccaatccgattaaaatctaaggaaaaggagcgattgtctgctttgcctgtatgattctgacttagtcagtagcagctgctgctttttccacttccaaagtccttaggaatgataatttcctgttgtcagcaaaatagcctgaactacttttccaacagaatgataacagcacaaatctcaccgtggtttgtctaaaaggcttagaggcttcagtggctcttatatacatttcttatttatgtattacatatctttaaaacgatgaagctatctagttttattgcttatgcacacaataactcaattgattaaagttagctcccattcctttgatctttaattgattgctaagcattgttacctctctttaacttgacattacaactttgtgacttaagtagggcaagagacattatgtccattttacagatgagaaaactgaagttgagagtaattaaaacgtacatttctatttggggtggaggagaaaacataaaagtgcatgaatagttaagtaatggcatagcaatagttgggtgtggtggcacatgtttatagttccagccacccagaggctcaactattgagtccgcagttctgtgtttcaatgtgttttgccaatttagcatctatactgtaatccagaagatgacatgttctgaataagagatatagaccagagggactaaaagaatgagagaagggtgttcgaattgggatagctagagagggtatctgagaagaggtgactcgagacatgtgttggaacctaataggcagataaaagtgaaaaagagaataacatgagcaaagatgcaaagatagaatgagaaggtgtagtgggggatagcaacaattatccatgtagtctataattcaaaaataatacttgaggctgggcctggtggctcatgcctgtaatcccagcactttgggaggccaagacaggtggattgcttgagcccaggagttcaagactagcttgggcaacatggtgaaaccctgtctctcacaaaaaagatacaaaaattagctggacatggtggcacacacctgtagtcctaggaaccagggaggttgaggcgggaggatctcttgagcccagagaggtcgaggctgcagtgagccgtgattgcgtcactgcactccagcctgggcgacagagacgttgtctcaaaaacaaaacaaagcaaaaaacaaacaaacaaaaaacaaacaaacaaaatctaggactgttggttgccaacactttataaaaggtcttacagggtagattaagaagtgataaatcactgcactccagcctgggcgacagagcgagacaacgtctcaaaaaaaaaaaaaagaaaaacaaacaaaaaaaacaaaccctttggaagtataaaataacaaaatgaaaatatttccatctaatgacctcgactttctttgtgaagttagctctcttagggcctgtggtgagggatgaagcttaaagagtgtcataagatttagtaacgttaccatagtgaacaaaaaattgccagtcaatgtcacagacttagttgaggctggaaatcataaagtcattatagccaataatttcttctatgaattatattcagcaatacttaggagttctggagcaggttttttaaaatggttgggttgattccactttggtgattagagttccatggaaaagaataacgaggggaggaaaagctgggtagattttgttgaaaagagtttcaggaaatgaaatgacagctagggaggggggatcaaggaaaatagaaaactatgcagtgagatccttgtcttatgtctgctattgagttcactccactaaaggattccaaaacactaaatatatagttcagaaaactgaatattcagaagagtttccaaaaaagaaaattagaaatacagtatttaatagttgatcttaaacctgatatctttctctcttctcttcactcccttctgctttcccttctttcctcctacctttccttttgttcctgtcttgctatttctttcctttggccttctctcattatctccctctctcacttccttttttccaagaagcatttgttgactactttgatcatattgaaggaactgattttatttttcacatggtatactttgaactttagataactgactttatttattttaataggttctggctgatagattgtcgacagatccaggaatccgttacttttgcatcacaagtatacagagaaattatctgcgtaccttatatggccaaatttgtagtgtttgccaaatcacatgaccccattgaagccaggttgaggtgtttctgcatgactgatgataaagtggataagacccttgaacaacaagaaaattttgctgaggtggccagaagcagggatgtggaggtactgtaccaaaaataataataataatttatgccatgttgttatacctgcattaatagattacatttcaaatatcatttaataaatagaataattaaaaagtgaaagacaagttcgcattttggtcagttagaaggtcaacatccaaaatctgccatttttagccattttggacctattcaataggaatgatctgtgcatgtgagaaggtaagatgattcctttaaagattatttgaggaaaaattatgagttattgataaactcaaagtatgtaagtgactgtagtactttagatgtttttagctttccttgttgtccttattttttaatagtaactaaaacagtctgggaagtatatctttttgcataaatgttgaagcagggtgtctagtgcttttctacattactttttcttatttcagaattttccatcagtgtaggtctttgggtgttgaagtccagtaacctgactcattgtgatgtcaaaagttacccaagcaggccaggtgtggtggttcacgcctgtattcccagcactttgggaggccgaggtgggtggatcatctgaggtcaccagttcgagaccaacctggccaacatggcaaaaccctatctctactaaaaatacaaaattagctgggcgtggtggcagatgcctgtaatcccagctactcaggaggcagaggcaggagaattgcttgaacccgggaggcggaggttgcagtgagccaagatcgcaccactgcactccagcctgggcaacagagtgagactccgtctcaaaaaaaaaaaaaaattacccaagcataagtttaaatttaggatttaaatgtattttggggttgtggaataatgggatacactttttggaatgagaacattaaatgtcaccatgcattaaagattcccattactagtaagaagaaagagtgctggacatgctgtgtcacagatagacagaatgtcagttgtcaatttaaagatggttgtatgtgtattataagaatttgaagttccaagtagtactaccacttctttgtgtaaacaacaagtataattgcagctactttattgttatttctctctgttttcactcaggtgttagaaggaaaacccatctacgttgattgtttcggcaacttggtaccattaactaaaagtggccagcatcatatattcagtttttttgccttcaaagaaaatagacttcctctatttgtcaaggtaatatatacatggaattttgtgatgcatttttttcaagatcaaggcagaatttgacttcctttagtaatagaaaattttcgcttttcagtcatcttcagagttttctttttaaccatatttgtaacgttttacagccctgggaaacaaatcatttttatttttgaggttcaaagtcaacctgaatttttatagactatatttaaggatgagaacaggacaaataatagccaactcattaattaggcacagtgaccggtattttccaaatttgaaggaaagcttatttatctattataacttttaaatatttatgcttagatttaaaaatacacgtgaacttcacaagtgtggagatcaaaagagttctaagtggcaactttttgtaataaaatctctcaaaagacccagcatctcacttaagctagtaaattatctgcaatagagctatagacttgatatattttcataaattcattcaataaacagcatggagacatttgtgtgcaccaggtgtttgttgtctctaaacagagaccaagttagggatttgaggtgatatatgcaagtttcattttagattccaatctaaaagggaccacatatgaaggaataagagattcaggaaataaaaaggaggtaataattctactctgcattattttccaagctcatttttcttcttgtttctcacaatttatttcactaatccagaggtcctaacgctcaatcctcttaggtataggctggcttctgtcgttttttttccaatcctacttcacctactcatttccaactgttcatcagcaatgactctttttattttaaccacttattatttttccaaacatgtgtctgcaaacctcttattaagtttttccaagatctctgctgagtctctttcattgtgccatttctggttcaattgttttgcctgactgatgatagattcttacagatcaccacattaagcagtaactgctcagaggtaatggatccatttaacatagacagctatataattaagctaatgtttgacatcattggtgtgcagaatcattctacaaacaacccaatacaaaatgagggaagtgcttcagtagacatttctccaaagaagatacacagatggtcaataagcatatgaagagatgttcaacagcgtagggaaatgcaaatcaaaactgtgaagagataccactccatacccattaggatggctattattacaacaaacaaacagaaaataaacaaatgttgggaaggatgtggacgaattggggccctaatgcattgctggtggaaatgcaaaatagtgcagcgactttggaaaacactatggtttttcctcaaaaagttaaacataaaattagtatatgattcagcaatttacttctcgatgtacacccacaagaatttaaagtagagactcaattacttgcacaccaatgttcttagcagcattagccatggtagccaaaatggaaacaacccaaaagtccaaaggtccacaaacaaaatgcggtatacacatgcaatggaatactattcagcctttaaaaggaaggaaattctagtttatgctgcaatatggtaaatgaaataagctagacacaaaaggacaaatattgtatggtttcacttatatgaggtacctagggtagtcaaattcataaagagagaaagcatttgtttttatttatttttttgacctctcctcgaagtgaaataaagatagaaagtagaagagtggttgctagggacaggagaagtgaagaatggggaattattgtttaatagatacagaatttcagttaggaagattaacaagttctaaagatggaaggtagtgatgattatacaacaatgtgaatgtacttaatgccaccaaactagacacctttttaggtttaatcatttttatgattaaaatgatacgttttatgttacatatatttatcacaattttttaaaaaaggaatgaaattctgacacatgatgcaatatgaatgaacttggaaaacattacgctgagtaaaataagccagacacaaatactatatggttcctccatttctacatgttcctagaataggcaaacgtatagagacagaaagtagaatagaggttattaggggctgggcaagagggcaatggggagctattgttcaatggggacagtttcggcataggatgaaaaacattctggatagaagtaatgattatacaactttgtgaatgtgcttaatgccactgaattttctacctcaaaatagtaaaaatggtaaactgtatgttatgtatattttaccataattattttaaaagctgagtaagttctgaagatctaatatacagcattaaactatagttaattgtatgtaatgtattatatacttgaaatttgctaagagatctcaagtgttctcaccacaaaaaagggggatgaggtgattgatatgttaattaatttgatacgctaatcatttcacaatgtatacatatatcaaatcatcacattgtacaccttaaatatatgcaatttttgtctaccatacttaaataagactaaaaaagaaagctgaatgatttttaaaaaggctttccaaatggtaataggaaaagagaaaggaaatcctttgagttcttacctagcagtaacaaatgaattttacttttccctttcaagcatcatctagttaaagtaaatactgcaaatcaaatgtgggtgaagcatgtatgtctttcttgttcaaggtacgcgatacgactcaggaaccttgcggacgactatcatttatgaaggagccaaaatccacgagaggcctggtgcatcaagctatttgcaacttaaacatcactttgccgatttatacaaaggtatcgtaaaatctgctatagtgcaattcaggtagagtaggaattgatttttaaatcttgttttaggtcagtgcaaaagtaatggcaaaaacagcaattgcttttgcactgacctaataaaatgaataccaacaaagactgattgaaagcatgtgtaataatcacgtttgattctctgtcagatttacgatttccacttaagaaaaaacgtagtgccacctgatttcatgttaaatgcactttgatgcaaaaattctattaatacacattgggcatggaagtaagaaaatttggcttcagatttaactttttgaagaaatttttaaaactaattggcttttcttcattattgttttcatgtgctttcctgcgaccatactcgtgcatttggccctatgaaaatattagagttcatcaccttctgtttactaccaattcacaggtggcttacatattattaaattcagaactgccccgtgatattttattttttctaagtaattaactattaatcttcgaacttatcatattttaggagcatataaactggtgtgatggtgcacacctgtagtcccagctactctggaggctggggtgagaggatcacttgagcccaggacttcaagggcagcttaggcaacataacttgtgtaaattgttggttaaaataaaaaatagttgaaatagttgattagtaaaaaacatatcgccatgttttgagtagatttaaaacattgttgaaaaggagaaatacattaatttctgaccccaagtctacctacaggaattactttcttttgaaatctctccccctcacgtaattcctcgaatactctgatgaaatcaaagaagacaactaaatcaattaaatgttgtggataatttatgtttcattcttttaaatttttttaaccaatatttcttttgaataggaagctctcacatggcaatctataggtggatgcagaagttgtcagtgtctatataacaggttgggaagggtgatgagtggtgactgctgagacctggaggggaagtaggaatatatttaaaatcctaaatcttgacatcacaaaacaaaaaagtcctatacttctttttccccaccacagttgttaaattttatatttgcttaatgaattattcttgtaaatagagatcagccatctagagaaaagctcatagcattaggtttgacattgtaaatttttattaaatgaataaaataaaatattatttgtatatttaaatatacatgttattccaagaattaaaatatagaaatgggtatatcaacccaaatgagcataatttcattgtattttgatggtgcagaatgtattttggggtttgtattgctgattagtagtgagtcagtggaggcagtatgccaataagaacgacaaagaaatatgtactgctgcgggcaagccacctgagtgttaaagaaagatgactgagctttggctgatttcagtgagctttcagtgtgctctaagagaaagcattaacttcattattacattttatttctaagtcaagacatatcagacacagctattaatgctgtgatagtccagtacaattttctaatttgtaactcaaaaagaaaaaaatcccagacattgtacattgaaaatataccttagtatttagtagctcttggctgggcaccatggcccacacctgtaatcccagcactttgggagaccaaggcaggaggattgcttgagtctagtagttcaagaccagcctgagcaacatagcaagaccttgtctctattaaaaaaaaaaaaaaagaaagaatttagtagctctttgttagaataatgcttctaaatattgcctgtgtattgaaaattttccaccatatgcttatttgtagcttttagtattttcaaccaatatctgtaatgattgggatattatcatcactatttctaaagacaaatgccatccagttcatttaaggtcaaactttgagactgccgtggtgacctagtatctggaattagtatatttataatgttggttcttttgtctcttgaatctataaactttgtacttaagccaatcttcttttctgcctgtcttctataaactgttagtaataaaaaaagagtatgttgactgtatgcttgcctgttgatgcttgttgaaagggtatttatttactctttccttttcttctaaatactctctactcttccttctctcttttttccatcttgcatggcatcttggggcggaaaggaatcagagtcagatcaagaacaggaggaagaggtaattttatgacagtgtcacttgttatcggctgtgtcattgctgtaaccactaataagagcacatagttaacctgtgttcttagacggggtaggcggttcttcttagtaattaaaggggcacaattttacttaacctctctaagcctctgttttctcatcttgtggagcaacttaagggaatagtaaagtttccctgtaaattgttgccatgtcgctatgcaatactatatttttccaccaactgctaagagctaaaccattatctcaggggttcttagtcagaagacatctagtggttgaaactctttttgtactaagacattattaatgtcttaatttttaattaaatgtcttagtacattaaaaatgtactaagacattatttgccttttaaacttctatatcctcacaaactataaaggagtctcccagaggctatactacatgtgatgatattgccactctggcaattaatggaatgtatgcttgcatactcttaggttctagcattttctcagccttcatttgtaatatggatatctatttatacatatcacacaccatcggaagtttttcaggctcctcagtaatttttgggagtgtaaaggggccctaagaccaaagagtttgataaacactgagaccaaaaaactttaagaagcatatagctgattccttagactatatcataatgcagaactatgctaataataataatttcttataaagtgggatctttactaagtgttgcacacgcctcatcaatgtcgatctctcacaaacacctatgaggtgtttgttattaaatactacattattgatgaagaaagcaagtcttagagaggttaccttgaataaatagctgtatgaattaaacctgcttcaatatttaaagcaaatgtgtgtttgtctccgttataaagatctgaaaatgcccaaatattataatagaaatgaaaaacataattggaaaacttaaaataatatgtttctaagatagacagatgcatatgttattagttatatgtaaatgttttcaaatatactagttttctttttttaaatgttattccaatgcattcaaaataaaaaatataataaatacccttatacccaccagcttaaaatgtaagcccttatcagttcagaagatgccccggattcgttttttttctgataccttgcaatggagcagggtgagagaggtgactatagaagcactgtcctgccgcacatagccatatacacaatcaacttaagactgaagtcattctttccctcaactgcacagtcactctttgcttcacatactccatttccttcctgtactcagtgaccctaccactacagctgttaaaaatgatagggaagccaattttgccatgttcacaaatcacttttttctcttagataattttcctactgaatactttctggaactatttagggcaatagatccagttcatattcttttcaggatctggaatgctggcttattattaacgataatgaaactacttctgtagaacacatcaccctagtgttgctgtttgtcatcctttcctttttctccactaaatggatacttattattcaatactgacttcaccctttttctgatgtattccctaaatatgtattccaacatcaaaaccagcctgggtcatatcttcccaggattaacatgctagaaaggactttctacctgtagtgtctagaaaacagaaggtttttttcaaagtcaggataagaatcatggagactctcaggaaaaaatgtagcaaattactctgaccttcctatagctatggtgtcacccaacatgtataattatgaataggagctttttgtgcacaccaggggctatgagccaaggcagtatttgtaaccattcaatttatgtatgttttctttcagatcgatatgacatcagaaaaaagtaagaatttaaagaaaattgagtttgtttgaaagctggctaccataaaaagaagcatgaattaaaatgcaagctagttgctattactaaccactatagtaattacatttttatattatccttattaatcattaatatatttataaaagcagcttggccagttaaattacaaatatacctaatttgcgagctaattagcagtaaaatgcaatgattattcatctaagcattcactttcttttgacattcttgttaaccctggtattgctgttatgcttgtttagaaacccaccctaccgttttgtccatttgttagcaaaacactgtcatctcatcattttttaagcactgacatgacagtatcactttttatgtaatgcaatagtgacttctgtagagagctcattatttttgtaggatacacctgcaaaagtgatactgtctaatagttcttagctgaagctaaccccatccaatgcctgccccctcccccatcactcttttgcactttttactgtggtgaagtgtaaccaatgtctttagagctgaggtctaacagacttctgtgaaaactttctgaaaaaaaaccacaaaacaaaaataaacaaaagtgaagagccaagaatgcaaaattaaaaccccctggataaaattactaatcacaacagcatgttattatagggttaattttaaataatgatgcaaatcccaaacctgatctagtagagagagaactggttttgacagaccttaaaagagctatcttagaactcatttcaggtttgtaatatccaattaagattttagtttgttggactatttctagtgactctctggcttcttgtgtggaaactccagttgaattttacagatttctgcttttgtgccccaaatgctttttaaaaatctgatttttaaagtttattgaatatcaataaactttatttcagagtttattttgatttgctgtatttcacagtatattcccaaaatgagaaaacttagaaccatgtttaatatgctcatgtggccctacacaatgatctgagggcttttttaaagtcctaggacaatgtaatttactactaagttatggaagttgctttgaatgaggcttaccctcatgttaaagcattattcagatctagaatgtttgagattctggatgttttcattggtttatataattgaacaaatttgtattggtataaattattttaataaatttatatgtgtaaattcacatactgtatcttctcaacaaatacagattctcccaagagaaggcacttttgtttatatgacatatcacattgccctcactgattcctttttttaagtgattttactttattctcccactttcttcttcagaactactccatttatttaaatggcctcttactttgctctcctgatacaaactagtaagaattaaaaattaattcatccatatggctcagttgttaaaaaaaaaagaaaaaaaaatgttaccatgttgctatgatgccatggattttcctgaaggatttctaggtgttttgagtgtttcagaagttttaaatacagactcaagtttgcttttgatttaaagataatcattaaataatcttcatctaggtataaactaatctctaaagaagtgctctgtggaagggactcttacctgaagtctttttatcagtacattttagaagagtttactgagttttcttccttaaccttaatgggtgtaagcccccacaacctaagcctcaatataccaccttcagcagcttatgcatggactcatagggaaataagtacacttcgccacagtaatgttttacatatctgttctaaattcccgccatcctcctgcccatacgtttcagcaaggccgcctctcccagccgttttactccacctttgctttgcatggaaataacttggcttacataaactgtgtgtgtgtcccgtgtgactgtctctgacttgggttgccatgcatcacattttaactttggactcacttataagtttaatcacaattgttgtttctgttgtttttctttcctttcctttatttccctccttggtctgtccattctgtgtctaaacaaggaggttgctccaaggaaaggaccatgcctcgtagcaccagactgtttgtttcattgttaggtgtgaatttcccttagatgaaatgccggtttgcagctgattcagatgtattttatatagtctttgtatattggtagaactaaacatactgaatttcagacttttatatgattaaaaatgtatatacatcattagatgttattctgagcttgctactactggctttctcctagaggaaatcaactttctgcaatttctaatgctttttttcttattttttcctcatggttggttttcttttttttttcaacattgatctgtaacatctgaacaatcttgagatacctctgtgtaatttcactgcgttctttgttttgatatgtagtgtttttttgtgtgtgtatgtgcgtcttgttttagctttgttgtatgtgtggatgtgctacaagtgagaaaaattaagcaagttatttcctgctcatttttccttttcagttgttttttttttcgttagccttgctttgctcttgtaccctgaggccttgtggatctaccattcccagcccattttgttgcccctcccaccaccaccaccacaggaaaagacgctgtgtcgtttcagtcctgattacatttgccaatatcttttttgatttccattttactttcaatgtttttcattcacatcaaagatgatgagacagaatctacagaaacatctgtcctgaaaagtcacctggttaatgaagttcctgtcctagcaagtccggacttgctctctgaagtttctgagatgaaacaagatttgatcaaaatgaccgccatcttgaccacagatgtgtctgataaggcaggttctattaaagtgaaggagctggtgaaggctgctgaggaagagccaggagagccttttgaaatcgttgaaagagttaaagaggacttagagaaagtgaatgaaatcctgagaagtggaacctgcacaagagatgaaagcagtgtgcagagctctcggtctgagagaggattagttgaagaggaatgggttattgtcagtgatgaggaaatagaagaggctaggcaaaaagcacctttagaaatcactgaatatccatgtgtagaagttagaatagataaagagatcaaaggaaaagtagagaaagactcaactgggctagtgaactaccttactgatgatctgaatacctgtgtgcctcttcccaaagagcagctgcagacagttcaagataaggcagggaagaaatgtgaggctctggctgttggcaggagctctgaaaaggaagggaaagacatacccccagatgagacacagagtacacagaaacagcacaaaccaagcttgggaataaagaagccagtaagaaggaaattaaaagaaaagcagaaacaaaaagaggaaggtttacaagctagtgcagagaaagctgaacttaaaaaaggtagttcagaagagtcattaggtgaagacccaggtttagcccctgaaccccttcccactgtcaaggccacatctcctttgatagaagaaactcccattggttccataaaggacaaagtaaaggcccttcagaagcgagtggaagatgaacagaaaggtcgaagcaagttgcccatcagagtcaaaggcaaggaggacgtgccaaaaaagaccacccacaggccacatccagctgcgtcaccctctctgaagtcagagagacatgcgccagggtctccctcccctaaaacagaaagacactctactctttcctcttccgcaaaaactgaaaggcaccctccagtatcaccatcaagtaaaactgagaaacactcacctgtgtcaccctctgcaaaaacggaaagacattcacctgcgtcatcatcgagtaaaactgagaaacactcacctgtatcaccctcgacaaaaactgaaaggcactctcctgtgtcatctacaaaaacagaaagacacccacctgtttcgccttcaggcaaaacagacaaacgtccacctgtatcgccctccgggaggacagaaaaacacccgccagtatcgcctgggagaacagaaaaacgcttgcctgtttcaccctccggaagaacggacaagcaccaacctgtatcaacagctgggaaaactgagaagcacctgcctgtgtcaccttctggcaaaacagaaaagcaaccacctgtatcccccacttcaaaaacagagaggattgaggaaaccatgtctgttcgggagctgatgaaggctttccagtcaggtcaggacccttctaaacataaaactggactctttgagcacaaatcagcaaaacaaaagcagccacaagagaaaggtaaagttcgggtagaaaaagaaaaggggccgatactaacccagagagaagctcagaaaacagagaatcagacaatcaaacgaggccagagactcccggtaacgggcacagcagaatccaaaagaggagttcgtgtttcctccataggagttaagaaagaagatgcagctggaggaaaggagaaagttctcagccacaaaatacctgaacctgttcagtcagtgcctgaagaagaaagccacagagagagcgaagtgcccaaagaaaagatggctgatgagcagggagacatggatctacagatcagcccagataggaaaacctccactgacttctctgaggtcattaagcaagagttggaagacaatgacaaataccaacaattccgcctgagtgaggagacagaaaaggcacagcttcacttagaccaagtactcactagtcctttcaacacaacatttccactcgactacatgaaagatgagttccttccagctctgtctttacaaagcggtgctttagatggcagttctgaaagcctaaagaatgagggggtagccggctctccgtgtggcagcctgatggaggggacccctcagattagttcagaagaaagctataagcatgaaggcctagcagagacccctgagacgagcccagaaagcctttctttctcaccaaagaaaagtgaggagcaaactggggaaacaaaggaaagcaccaagacagaaaccaccacagaaattcgttcagaaaaagagcatcccacgaccaaagacattactggtggctctgaagagcgaggtgccacagtcactgaggactcagagacctctactgagagttttcagaaagaggccactctaggctctcccaaagacacaagccctaaaagacaagatgattgcacaggcagctgtagtgtagcattagctaaagagacacctacaggactgactgaggaggcagcctgtgatgaaggtcaacgtacctttggtagttcagcccacaagacacaaactgatagtgaggttcaagaatccacagccacctcagacgagacaaaggccttgccgctgcctgaggcttctgtaaagacagatacaggaactgaatcaaaacctcagggagtcattagaagtccccaagggttagaacttgcactccctagccgagatagcgaagtcctcagcgctgtggctgatgactcattagcagtgagccacaaagactctctggaagccagccctgtgctagaagataactcttcacacaaaacccctgattctctggagccaagtcctctgaaagaatccccttgccgtgactctctggaaagcagccctgttgaaccaaagatgaaggctggaatttttccaagtcactttcctcttcctgcagctgttgccaaaacagaactcttgacggaagtggcctctgtgcggtcccggctactccgagaccctgatggcagtgctgaggatgacagtcttgagcagacatcgctcatggagagctcagggaagagccccctttctcctgacacccccagctctgaagaagtcagctatgaggttacacccaaaaccacagatgtaagtacaccaaaaccagctgtgattcatgaatgtgcagaggaggatgattcagaaaacggggagaaaaagaggttcacacctgaagaggagatgtttaaaatggtaaccaaaatcaaaatgtttgatgaacttgaacaagaagcaaagcagaaaagggactacaaaaaagaacccaaacaagaagaatcttcttcatcttctgacccagatgctgactgttcagtagatgtggatgaaccaaaacatacaggcagtggggaggatgaaagtggtgtccctgtgttagtaacttcggagagcaggaaggtgtcttcctcctcagaaagtgaacctgagttggcacagcttaaaaaaggtgctgactcaggccttttaccagaaccagtgattcgagtacaacctccttctccacttccatcaagcatggactccaattccagtccagaagaagtacaattccagcctgtcgtttccaaacaatatactttcaagatgaatgaagatactcaggaagagccaggcaaatcagaagaagaaaaagattctgaatcccatttagctgaagaccgtcatgctgtttccactgaggctgaagacaggtcttatgataagctaaacagagacactgatcagccaaaaatctgtgatggccatggatgtgaggccatgagtcctagcagctcagctgctcctgtctcttcaggtctacagagtccgactggtgatgatgttgatgaacagccagtcatctataaagaatcattagctctccaaggcactcatgaaaaagacacagagggagaagagcttgatgtttctagagcagaatctccacaagcagattgccccagtgaaagcttttcatcttcatcctctttgcctcattgtttggtatctgaaggaaaagaattagatgaagacatatctgccacatcttctattcaaaaaacagaggtcacaaaaactgatgaaacatttgagaacttaccaaaggactgcccctctcaagactcatccattactactcaaacagatagattttccatggatgttcccgtgtctgacctagctgagaatgatgaaatctatgatccacaaatcactagcccttatgaaaatgtcccttcccaatcttttttctctagtgaagaaagcaaaacccaaacagatgcaaatcacaccacaagttttcactcttctgaagtgtattctgttaccatcacatcccctgttgaagacgttgtagtggcaagctcctctagtggaactgttttaagcaaagaatctaattttgagggccaggacataaaaatggaatcccaacaggaaagtaccttgtgggaaatgcaatcagacagtgtctcttcatctttcgagcctactatgtccgctacaacaacagttgttggtgaacaaataagcaaagtcatcatcacaaaaactgatgtggattctgattcttggagtgaaattcgggaagacgatgaagcctttgaggctcgtgtgaaagaggaagaacaaaagatatttggtttgatggtagacagacaatcacagggtaccacccctgacaccactcctgctaggaccccaactgaagaggggaccccaacaagtgagcaaaacccatttctgtttcaggaaggaaaattgtttgaaatgacccgaagtggtgccattgatatgaccaaaaggtcctatgcagatgaaagttttcactttttccaaattggtcaagaatccagggaagagactctctctgaagatgtgaaagaaggggctactggggctgatcccctaccgctggagacatcagctgaatcactagcactttcagaatcaaaagaaacagtggatgatgaggcagacttacttccagatgacgtgagtgaggaagtagaggaaatacctgcttcggatgctcaacttaactcccaaatggggatttcagcctccactgaaacacctacaaaagaagctgttagtgtagggaccaaggacctccccaccgtgcaaacgggtgatatacctcctctctctggtgtaaagcagatatcctgccccgactcttctgaaccagctgtacaagtccagttagatttttccacactcaccaggtctgtttattcagataggggtgatgattctcccgattcttccccagaagaacagaaatcagtaatcgagattcctactgcacccatggagaatgtgccttttactgaaagcaaatccaaaattcctgtaaggactatgcccacttccaccccagcacctccatctgcagagtatgagagttcagtttctgaagattttctatccagtgtagatgaggaaaataaggcggatgaagcaaaaccaaagtccaaactccctgtcaaagtacccctccaaagagttgaacagcagctctcagatctagacacctctgtccagaagacagtggctcctcagggacaggacatggcaagcatcgcaccagataatagaagcaaatctgaatctgatgctagttctttggattcaaagaccaaatgcccagtaaaaacccgaagttacactgagacagaaacagagagcagagagagggccgaggaacttgagttagaatcagaagaaggggccacaagaccaaagatacttacatcccgattgccagttaagagcagaagcactacatcttcctgcagggggggcacgagccccacaaaagaaagtaaggagcatttctttgacctttacagaaattccatagaattctttgaggagattagtgatgaggcttccaaattagtggataggctgacacagtcagagagggagcaggaaatagtttcagacgatgaaagtagtagtgccctggaagtatcagtaattgaaaatctgccacctgttgagaccgagcactcagttcctgaggacatctttgacacaaggcccatttgggatgagtctattgagactctgattgaacgcatccctgatgaaaatggccatgaccatgctgaaggtatttgccagccaccgggattccctgtgctacgcatgtcataaaattgatatagtttttttgtatgtttgttttatttgatgatttgtgtctcattttctttaagctttctgtagtggctaatgtgtttgtgtaagccctttgtgttttgtgctttctctgtatactcttgtctaagaaaacaatctcaagattgagtaatgagaatgcttatggaaaacataaacataataaccgggcaacagtgatcttgccttttttagcctctgcacgtaataaggccatgcgagctttgagttttgttgttctgaagtcccaagcttagactcaaattaagcacttttgcacataaatatattgtattttgtttcatagtatgaagacattgcttttcttcttatcttcgcatactttaaaataatttgtacttacaattttgtaatcattaggaagccatttgcttgagaagatttcacataacatgaaattctaattgttgtggatctgtttttgattcagaaaggttggatttcagataccattggtaaatactttaagcaaacaaacctaaggtaaaaatatgcttttcatttatgtggtagatgaatggagaatgtactctcattagatgcagcagacaacaaaaactcaaactttgcacagtttaagttgactgtgaggggatgatggctctttgacttataaaaaaggaaaccatagatggctttgaaaagtagcctgtgttcttccaatatctctacaatgaagactgtcattcttaaattgaggttatacaaactttcctataccatggtctaaaatgctgcctatcaatcagtgggagttaaacatgaatgggaaaattatagtttataggagtgagtagtatataagcttaatagcaagaaggcagaaactttgcccaaaagacatatatgcatacagatacaatatacacataaaaatgcatatgcttttatcctcgtttctccaaggtcaccaggaccaaatgttgtttctggccacactaatcaggatggcctgatcagctcatgatcaacatctcttgtgaatctctgatgtgattcctttcagacatgacctggaaatgatctatccctccacaagcaataataggaggtcctagccaattgctctacttctgcatcccatttatgatttctctggtgtttcatgaacaagatggtggtcttcttggtgggcagtattctctccaataatttaaaagtcataagattactagaaatcagcaacttatataattatgtctagaactagtcttgattaaagagatatggaagcagatggttttcatgattcatattagatctattccccattccaccccagaaatcagacacacaatatgatctgaaatgtagtatctagtttgtgctttcaaatatttggagaagtgacttcctttctttgaatgaatcagtactgtggttcctctcctgtcatagacaacctttggccattctgtttttgaccttctccagatccacaggatgagcaggaacggatcgaggaaaggctggcttatattgctgatcaccttggcttcagctggacaggtaaaaagaatgtgacccaggttttcaacaaaacctgacatagatgcatcagtcaggtgtcattcacagcataaaaggtaccccccactttcttgagaaagaatacatgaaaagaagaataaactaagaactagaaaacctgggctctgcatcagctaatggtatagcccagggcaggccttttatcatctctgaaatttagaataatagaactttctatttgaagatttagagaatataccaacattcaggaacctctgttggcagttgtggatatctaaatttgggggagattattatgtttcaaaatcatttttagatgtaatttttatcaaatttaatgtgagatttaaccagggctccttcttttagataccttatgtcaaaaatcttcatagtaaacaacactaaaaattgctttgggtaagtgttaaaacacacatgaatgagatatttcactaatatttttgagaaatgagagtgtttaagtatagaaattttatgttaataatttattaaggaaaagtgaattctaaaatcaatatactttatttacacattatgaattgtatgttttaaaaactatacattttcatctacttgtgacttaacctattaaagcaagattctcagtctggctttttttttttttttaatatcacttgtgactacttcaaagagacaaacattgtaaaataatattcttttcctttccatttcttagatttggtgatgaataggagcccataatactcataaagataactactaatttagagtacatgactggagaagtggccactttctcacttgtaataattttaaagtaattcttacatactgatcagacttaactaattcggggttttaggggagagaatgataccaaactatccgtgattgacttactagataacattcagaattatttattttggtttttaaatatgtttgtatccatacctacatagtaaatgcaatatgtatatatttggtaaaaattcaaatcctaccaccatatagaatgacatagaatgaaaagtaaatatgactctcacacctacttctatcttctagccgtgtgcctcagaagtaactgctaatactttctcatgcttttagaaaaaatatacagtgcctatatttatgcctgttatttaaaagtaagaaaagttttactgaataatattcctcataagtagtctgttaacatatacacatgtatttcattcttttaagtgggtatttaattccactatatggaggttccataattttattaatggcttttgttgatgggctttaggtggtttcccagtaacggcagtaaatattcttgtgcattggtatatttttgtgagtatatctatagggcatattcttagaagtagaattgctgcggaaaagatacgtatatttttaattttgaaagatattgtcaaattgccttcaaaagaggtcaccctatttacccacacacgcatacacacaccccataatgtataagcatccatatgtaatggttttttgtttgttattttgtttttgttttgttttgttttacagagacaggatcatgctctgctgcctaggccagagtgtagtggcacaatcatagctcactgtaacctcaaactcccaggctcaagtgatcctcctgccccagcctcctgagtagctaggacctcaggcaaacactaccatgcccagctaattttttaaaattattttttgtagaaatgaggtttttctatgttgctcaggctagtcttgagcttctggcctcaagcaatccctaccacctcagcctcctaaagttctaggattacaggcatgagctactgggcccacccaatccatatggaaggttaatagtagaattcaaaggaaaattttgtgtcttcttccctggatcaattaatgcttcctcgacctcttattcagttgacatcaaatcaaagaaaggcatttatccaaccaccataatatagctacaactagtatttatcaaagtatccagaaacaggatttataatactcaaaacatcacctatgttaattaaagggagaaactttttttcttttgttatcagtcatttattttccattatcttgcttaaaagtataagcaagtattaatgatctcatttgcattttggaatcaaatgggcctgaattatacatatcttatcattgctgcctcacacttactattttcactatgcagtgataaattctatacccagttttaggggaaaaaatccataattagtactagaagaacaaaggcatataagagtcacttctaatatgtagaaattaaggaactcaaatactcaccacaatataaagaacacatcatttacaaaatcacaaagcaaaatgtagagactgaaaccttgaagttaatgtgtttacaaagtagtattttatcttctagaattagcaagagaactggatttcactgaggagcaaattcatcaaattcgaattgaaaatcccaactctcttcaagaccagagtcatgcactgttgaagtactggctagagagggatgggaaacatgctacaggtaagtggggaactatatgcatattgggctaaagttggacatgtcttgctcaacaaccgcatcttgcaaattcagtagaatagtaaagaagcaaatgccattaatctgcagtacagtgggtccttgagtaatatcattttgttcagtgtcatttccttataacattgatgagaaaaaagaatcaattcccagcaaggccactgtctgtgtatagtttgtgtatcctccccatgtctgtgtagctttttccccagtattccagtttcctcccacatcccaaagatgtgcacatcagtttcactggtgtttctacattatcccattctgagtgagtgtgggtgtgtgtgagtgccccctgcaatgggatggcatcatctcccagcttggttcccatgcaaagtgctctgagctgctgggttaagttccagccacttgagaccctgaactgaataaggggattgggaaaagaatgaatgaattgatacaaattgttgtcaaatgaaaatgtatagagtccatggtaattacacaaatgcatgaaataaatgatgccttaggaaagtactcagcgagcccaccatatttgttattgtttgtttatgaatggcatggtgggaggaggtgctccttacaattttcactttgcaaagatttattccttgattgaaccccaccaccactatgaccgccatcacgcattggttcctcaaaaattgaataattatcttacttatgtttattagtctttcttaaatgtatgtgtaactcactttcacttcagtgtttaatattaaaagtgtttggggttttatttagaagtttggcagtgtttttgtgaccagaacattgttttctaagaatctatcaatgatgttgagtgagaacttagtgaactactgtaagcaaatgagaacaagctactgtcacttctgaagtatgcatgttgcttaaaaactcttgcacgatatgcgtatgaaccgcattaaataacagccctcacttctaacagtaatgttactcaaaccctaatatttttaaaatattgataagtggacacaattgctttacttagcattgtttcactggtagtgcattaccttctgtttctgcttcctttactcataaataacatccagtctacatttatcattccttgtctttacattcttctaagtagaattgtcagatttagcaaataaaaacagaagggtgcccagttaaatttaagtttcaggtggtcagcaaatacatttttagcataagcatatcccttgtaatatttggggcatatttatactaaagaagtatttgctttttatctgaaattcaggtatggtgggtgtcctgtatgttatctgacaattctacttttagggcttttgcccatgctgtaccactttttttatgcatatctcttttgtctgttggcttatttttacaaagacttttaattaggctttgattgtttttttctgtacagatatcaaaaatttagtaaggcagttgagtgaaagagatttttaagagtacctctcagacataataaatgctgtttctctaatgtgtcagataccaacctcgttgaatgtctcaccaagatcaaccgaatggatattgttcatctcatggagaccaacacagaacctctccaggagcgcatcagtcatagttatgcagaaattgaacagaccattacactggatcatagtgaaggtcaaactgtgtgtgtgtatgtgtgtgtgtgtgtgtgtgtgtgtgtgtgttgtgtctgtgtgtggttaattgaggcactggacctactgtcttttttttttttcagaaggtagaccatggcctatggtgatcatatgttcttttccttgctaccctgaggctttcctccctgttttacacaccctcccacctccgcttcatgctcattctttgttatttcacagataacaaaatgatccattgaattccttttcctcagttccatggtggcacttcttacacttgtatttttttatgctaccttagccacgtatttctaggctcacaactaggactatatcactaccagtgactgtacatttcctcttttacttctgcaccaacagtgcttcataccctcggggacctccagccattggccttaccaccttttcagtgttaaagttcccctaacctattctcattcatttgtggtctctaacactgtttttttttttctctctctctcttatctctattttacatgttgtcttcttccttcaaacctccaacactgtctcttttctttatttatacccagctgatgaccaaacttcctatttcttagaaaataataagaataatcagaagcaaatgtctatatttttccaccacgaatctaccaacatgagtgcatctcaatgcatatacttaactctaccttccatcctattaaaatggataaaatttcttcacttttctaaagccatcatctcttgttttgtactagatttcatctccttttactcaatcagggactccattcctgcaagtatcccttttggcttcctaccactagaccatacccaacagcattaaaccatgctttaatagatcccatctttaaaaacaaaacaaagcaaataactccttttaccctatatgtcccccctgtattattgctgttactccatccatttcacaggaaacctcttaaaagaacagtctgaatttcctgtctctacttcctctcttcccattccctctagagctctataattcactctagtcaatcttataaaattcacctattgtttcctctttttcaaatctagcaggcagttctcattcttcaacttactttgcctctgggtaacatttggcatgaatagtgaagcctgccttcttaaaacattttctttacttaaatttcatgacattcttgcttcctttttttttttttttttttttttaactttactggctgtttctccttcctgtggcaggttacttctcatggatgtgaatgatgatgtatcttaactgttgagcaagagcctcatagcttgtcctcatctcccacctctgtctctatcgcactggtcctgcacgcctggcctccttgccatttctggagcaccctctgcattctcctgtttcagggccctggtattttctgctccctccaccctagcatgttctttcctcagatcaacatatacctttttctctcactttatttaggtcactgctcaaatatcgcctcctaagcagagcctttcctgacaagtctatttaaaatactagccccatttatcctctacctttatcctggtttacttttctcccaatatttatcataaatatatatctgcagaaatgcaagttcagtggggacggaagctttttatatcttatatcttgttcactgctatatatccagcatctaagcagcacttattacatagttggtgctcaatatatatctgttgaataaatgagtcaatagatgaatgccagtcactcctctgctaaacatctttcaatgactcctcatttccctggatataatgaaattccttagcctgtcataaaagactctacataaaaagagtactatccttatagtgttagagtgagtattaatcaagttaatacttgcagtgcacttgaaacggtgcctaacatggaataaattttcagtatgtattagctattgtttgttatgatgattattaactgtactcatcttactcttcagattctgtgctttgactgtctcagtcaattcccacttgccattaggtctccttggcatgtaacacactctgcattttctttccaaattctaaccccatgttaggtgctcccacactcattgactggcacctatgacccagttgctctgcactggaattgaccgttacttgcgtggactcttctacatgatccgtatcttgaaggtggacacagtgtcttcttcatctttgtaatccatgggcccatctcaggatgtagcacatttatcttcttattttttttatcctcttatatttattacttaataaatatccattcaatataggtaagcttcaactaaatacttaaatcattctgcctttagggttctcggtacttcaagaggagttatgcactgcacagcacaagcagaaagaggagcaagctgtttctaaagaaagtgagacctgcgatcaccctcctatcgtctcagaggaagacatttctgttggttattccacttttcaggatggcgtccccaaaactgagggggacagctcagcaacagcactctttccccaaactcacaaggagcaagttcaacaggatttctcagggaaaatgcaagacctgcctgaagagtcatctctggaatatcagcaggaatatttgtgagtttccaaagaaagcctgtcaaatgtaataccaaagaaacaggctattgtggatgccaggcatatataagcataactagtttttaaatactttttaaaatgaccctaccaaacacaagtgccagagctaaaggggaaaaaaaaagcgttaacatgtaagagacataattgtgacagtgtttggggcacagacctacaagaaccaacttccagagctgtgactttgaacaagtccttatgtgctttgaatctccatttccacatctgtaaattatagtaataatacacacttgactcatctcacagggtcaaaagtgtgtttatgaaagcttcatctaaactgtaaaattccctgtagatgacacggccatgacttataatattgctgcacctcatttgctctgtagcacttcaaatatgctctgtagcacttcatcgtgccattgctggttaggagtatggtcagtgatgatgtagataccacagccaatggtgcatttcaaccaagctatgaggggactaatcataaaaatataaatgcaatgcaaactaaccacatagaataaaagactattaaaatgagttggaatagagttggggtgggagtaaagagaagccttccgaagagcttctggctgaaggaagctgcaggcctaatttggctcagaatttaagttccggcctttatggaagccaaggagaaagagttgtttaattgacactgattgtccagaaaagaaaacaaattgtgagaaaggccaacatatccctaaacctgaagtctgagaatagggtgtcatgagattgtatcaaaacatttcgcttgtcatttggtgagttttgtggtcattgacatgagaagaggatgaaatgagtaatgaaattatctcttcttccactgagccacccttgccccatcaacctgtaggttttaaagaaaatataaggaagaaggagaaggaccaaggaaaagatgggaagaagaggagaggataacagagagacattttaggcatttaatatctatggagtgatagattgcactgaataccaaaagaaggcacagaaaaggccaataatcttatttagcagttgaggttatcaaagttacattggagtaactccagactatatcaatgaaaaaagtttccatgtcaacagatgcctctattattaaataaaacagtttttcagaggtacaataagaatttccttgtatttatacttatgataactatattaacatggggatttatgtaattctgccaaatttttattcttgcttcaaaagccttattatctacaaatacttatgtaaaattcctcgcatcctcaatatcaccttgagttataaaagaaaagatgaaactataacttatatacattgtagaggttgggtaactgtaatacattttaggataatttttgtctttagaataataacatcactctctgccagtgctagatcaatgagctacaactctatatcttgtcatattatttttcttcaaatgtcctttcttggccaaatgtacaaaaactattttgactgtcatagactatggaaaaaccagctccatcttgcctttcgatttccttgcttgagcaggaggtgaaatgcaaatgtccctgaagtctcatttggctttttgattccagtgtgacaactccaggaacagaaacatcagagactcagaaggctatgatagtacccagctctcccagcaagacacctgaggaagttagcacccctgcagaggaggagaagctgtacctccagaccccaacatccagcgagcggggaggctctcccatcatacaagaacccgaagagccctcagagcacagagaggagagctctccgcggaaaaccagcctcgtaatagtggagtctgccgataaccagcctgagacctgtgaaagactcgatgaagatgcagcttttgaaaaggtaagacattcctctccactttctcgcccacctgtaacaaagctacaaatcttccagtttccatttctatgatggtttattttttgcacttcaaaacaaaaaagttaaccaaattaattaacctggcacatggaaaccctcaatcccttttaaaatctgagagccgatgaatcttgaagaaatggcgcacagttccagtgctgttgatttgaccatgagccctgatcttatcattggaaagtcttttgctaagaaaaatgaatacggtggtgaaacaatatatctggaggagcttttcaaaattagtaaacttgggcatgaaacctggtggcagagattagcagcaccaggtaagtcagccatgggatgtgctgggaccagcaggcttgttagatctctggcctgccaggtgatgagcacacagactgtggatattgggtggggtttagctgccaaaataaatttttctcattagaggcaagatgatttccaagttagatttttttttttaagatttattttaggaatgactgagaaaaagaacattgtacctaaattaaatgtccaaatgcctgacggtggcataagattgcatcatagcgcttcctttgtcattaagtgagttttaaaattgtgaaaaggggtggggaccatgttaagaaattaaccattggccaggcgcggtggctcacacctgtaatcccagcactttgggaggctgaggcgggtggatcatgaggtcaggagatcgagaccatcctggctaacatggtgaaacctcgtctctactacaaatacaaaaaaattagccaggtatggtggcgagtgcctgtagtcccagctactccggaggctgaggcaggagaatggcatgaacccgggaagcggagcttgcagtgagccaagatcataccactgcactccagcctgggcgacagagcaagactgtctcaaaaaaagaaaaaaagaaattgatcaacaatttattctcaaaatgtggtctatatagttcacatacgtcagaattgattggagagcttgatccctcctcagaaatcctgaattagaatgaatcccagggtggggagggaaagcaagaatttgccttttaaataactccccagaggattctcagccacaaaaaaagtatgagaatctgtttgaattaaacttaatttaatatgaattaaacttaatttaatataaattaaattagatattgttttttcttttaaaaagtaatagaattcaaaaacactttatatttcaaagtgtttttagagcattaatataaagcttagtagtaaaagaagagttaaacaaaataattgaaattttggggggcaaataaagtgaaacagcatgtgtttgggcttaagacacacatttgtttttgttcactgtaagaatgagatctgctgctaggaattatctgaaatcacaactaaaattaggaaagatccaggcagatgagaactgtgtcctgattttggcagttttcttaaataataaattcatgccatgaatgaatttttattccaagtttgcttttgcatagaattattcatctctcaaattcttggcttgaatgagtactactaaaaatgtttcttacatgttatctaggctaaaagttaccaaatttaacctaagaatccataggcttagtgaagttagacttgaaacaattatctggataatacatatgtttaatctatactaaaggaatatgtttgtataagtcactctgaatttcacataatttatacaggcctgttcgacttattcttgatgagtatcaggcatttctcttaagcttcccatgtggacccttatttctcataaccctaacttgggcatccaattttaatcacttttcttgccaaccatatttctaggcagtagattcctgattatatttaaaatataatttggtttagaatttacaggtcttcctttagcagagacaaatgtaaacatataacttgagttttacagtgtgttaagtaaatctacttgagctttctcttttttaaaaacaaaatttcattagggaagagtaattcaatatatgactcctaaggtaatgtgtgctaagctaaaattatgttttttgctttatctctggcttttggccagagccctaaaatactattgaccactttatctcaacttctccatagaattattctaatattattcatagtctacctttttttgatgccagggagatgcactattggttagataatagctacaggaaactttgacttcctgcaaaaagttctgctagaaacaggggatattcctatacctttgggtgaataattccaagcctaagcaccagtgtcagtggctcataagtgtttactgaactgcttagggtctatgtttacagtcaggctttttttttaggagtttaagtaaaagaagtcacatgagcaagctgctttttattttggagagattttgacagatgggttctccaacagctctcagaattccagaattttttttcattcattgaacaacaacaacaaaaaaccaaaacactctatttttgttgatgtctgagaccagcacgtatttgttttcacctctaccaacttgtccatcaaagcctccatgaataaaagtttcacaatacaatgtaagctaaagaagaaaccagtagtgaagtcattccttagcatgttaaacaaagcaatgcttccatgcttccaccaggagctaacagaggaattaggggagctggaggccagctcagatgaggaggcgatggtaactaccagggttgtccgccggcgagtgattattcaggtacccactgttaaattactgcacgtcagggacagtcctgtccccatattctaagagtgatcaacctggatcaatgaaggcttggcatgttccttaggtagtgcatggccattcaaaagcagatcccttaactctcataagttctgtttgcaaacaaatgcagtggttccagctttcctccaggagagccaccaagcaagagcaagacttggcttcttcacttccacccacctcacctctcgcttttctatttttgttgaagttttatctaactttggtcagattctcctaagcatgttattacccacttgagtttttcactagttgacaggattttgtatctcagcaatgcttctcaacatcgcctttgattttctaacattcctcacattataagcacttgggagtagttcctcagaattggtgccaaacaccacagtgacccttttctctcaactgtttagggagacgatatgcctgaaatacccccagaaacagtcacagaagaagaatacattgatgagcatggacacaccgtggtaaagaaggtattgtctagtatatcctaacagggttgattacaaacttcctgtttaaaatttatcaattccatggtactgtcacacaaaaataagatacacaaatgaaatacatttcaggttactaggaaaatcattaggcggtatgtatcctctgaaggcacagagaaagaagagattatggtgcagggaatgccacaggaacctgtcaacatcgaggaaggggatggctattccaaagttataaagcgtgttgtattgaagagtgacaccgagcagtcagaggtgagacaacctgattctctaaaacccatttgatggagaggaacaaaatagagctcaagaaagatgagtgagattgtttattcatattttcctcacttctccctttcatgtggcagtttgctcttagttgcacattcacctttttgttttcatgattctatgtgattttaagacagccatcagggagacttgtaggcattatactcattgtttttgtttggtctttttaaaaatatctattctttatttaattcatggttgaccactgcagaaatccaaaagtcaaattttgaaagaatacaattctatttgctgggcaagcagtatgctgtggagacaccgtgtagaaacgcactgtggtgcttgtgcctggttggcacaccagccttcagaaagtcactctagataaatatttgatattcagatttctgcattgcagagttactaaaatcaggatcgagaaactctttgatttatccttgttttttgttttaagacagagtctcactctgtcacccaggctggagagcagtggcgtgatctgagctcactgcaacctccacctccgggttcaagcaattctcctgcttcagcctcccgagtagctgggattacaggcacccaccaccacacctggctaatttttgtatttttagtagaaacagcatttcaccatgttgggcaggctggtctcgaactcctgacctcaaatgatccacccgcctcagcctcccaaagtactaggattacaggcatgagccactgcacctggcaatctatactttaatttatttctgttttacttccctttttcagggacatatttacttgttttgacaaatagtttgtgaaattctattttccattcattcacatcctcaaaattttatattatacacatgagattctctagaaatctacttttcagtttctcatagcttttagagctcctcctttgagggctaatttcatctttgtaataccaaaagaaattatttaaacatgagaaaagagagtttcttcacatattattatgtctgtattacactgagcagtttcttattcacaaaactgataactttttgttcaaatgactaattaagattgctttggtgttgtggagatacagtcatgatgtagatattaccaataggttatagttcgtttttttctaactctgcttcccattgctgttttctggaaagccagtatgtaactttatagttttgtcctttgttttttaacatagaaaaaattcatcatagttacatttggcaatcagacattgtctattgtgtgtccttcgatcattaggtcactttgtgtgagcccagcattttgtccagtacctcacaatttcaggctgagccagtggaaggccgtagagtcagcaaagttgttaaaacaactgtggtacttggagagaggatggagaaacatctgggggattctagtttagccactgatcttccttcagccaaagatgactttgaagaggtatagaagcatcatcatttgtctttttatgtgtgtgttttatgttgctttgcatttgaaaagaaaatcgtttgtcattgtatcattctatacatgaattcatggaaaggtgcagaataattcaagagggtagaactcctgtttgaataacttgcagagtaacgtttccttaaactgtggtgttcattggtgtcaccttaacagcttttaaaaatccaggtaactaggatttgcttctgctgaatcagactcagaatctctggagctggtatatgattatacatcttgtttaaaagtcacagaagtgtcttgctttgtcaattaataagggaaagaaataaagacattgcaaattatatttgctagccagtcttttcaaatataatctgtgatagacattaaagaaaattcagatatattccatgtccataaattttaaaagcatttacaattacttaagttctggtttccaacaattagaaaatgggtccacggttggccaggcacagtggctcacacctgtaatcccagcactttgggaggccgaggcaggcggatcacaaggtcaggagatcgagaccatcctggctaacacggtgaaaccctgtctctactaaaaatacaaaaaattagccaggcgtggtggcgggtgcctgtagtcccagctactcgggaggctgaggcaggagaatggtgtgaacctgggaggcggagcttgcagtgagccgagattgcaccactgccctccagcctgggcaacagagcgagaattcgtctcaaaaaaaaaaaagaaaaaaaagaaaaagaaaatgggtccacagtaacagatccacaaactcttactaaaatccccaaatgctgaaaaccaaaacaaattttgtaagttaatttggaagtgaaacttgaaataaattggcatggagctattatgacatgaagcttttttattctacctagagtgaatgttttagtgacataaaaatgggtttgattacaggatgccatcttcgctctggagtattagtattatatagtacagtcatgcattgcttaacccacttatgccagaggttgccatttttaaaatttttgcatgagtgaaaaatcagaccttggtgatgaccttgagcagtaggatataaataacttccacatgcctagtgttcactaggcataagtgggttttaatgacagggatatgtgctgggaaatgcatcattagacaactttgtcattgtgtgaacattgtagaatgtccttacacaaacctaggtggtatagcctactatacttctaggttatatggtataacctattgctcctggctacaaacctgcacagcatgttactgtgctgaatactgtaggcaattataacacaatggtaagtatttccctatctaaaaatagaaaaggtacagtagataaacaaaataaaagattaaaaatgttctacctgtatagcatacttaccatgtagcttgcaggactggaggttgctctgggagagtcagtgagtgagtggtgagagaatgtgaaagcctaggacgttattatacactacagtagactttataaacactgtacacttaggctatgttacatttgtttaaattttcctttaatttttttaaatcttccttctgcaataataaattaactttagcttactgtaactctttgactttataagcttttacatttattttaacttttgactcttttgtaataacacaagttaagatgcaaacacattgcacaggtgcattaaaaattgtttttcttcatatccttgttctataaacttttttctgcttttaattttttaaatttattatttgtttttactttttaaggtttttttttttttttttttggctaaaaacaaaggcctaagcatgtacattagcctaggcctacacaaggtcagaataatcaatatcactgtcttcctcctccacatattgtcccactggaaggtattcaggagcaataacatatggagttgtcatatcctaagaaaacaatgccttattctgcaatacctcctgaaggacctgcctgaggctccttgataattaactgttttttaataagtaaaagagtacactctaaaatagtgataaaaagtatcacttttataatacttgataatgataataagtgactgttactgatttatgtatttactatacatagtaaatgtatttaccgtacataaaccagtaacatagtcatttattatcattatcaagtattatgtaccctacataattgtatgtgctgtgcttttatatgattggcaccttagtaggtttatttacaccagcatcgccacaaacatctgagtaatacattgcaccatgaagttagaacagctatagcatcactaggtgacaggaattttttagctccattataatcttatgggaccatgtcatatatgcagtccatttttaaccaaaatgtcattatgtagcatgtgactgtatatgcattatattaccttgctaaaatccaaaagggacaaaaaaatctaaattttgaaacacatctggtcccaaagttttgactaagggatcctgggcatgtgcaaacatctacaaagtacttttgctattggaacattttgacactaaatgctgtatgtgtgtcctctactatacccataatatatattgaaattatatatgaattcattggaatattaaaagcaaacctcttaaaatactttcagttttcacattttgacaactggcaatcttgaatggtcaaaaatgaattatctgtgttataccatttgggccttgtttgcttgtttttgcctctggttcttacatttatcattaaaatctccactgtagaaagcagttgggtgaagcaaggaggaaattgaaagtcaatccatatggatgttgcttagcagcttttgtaaagtacaataacaaatctccctcacaaatgagagaaactaaaaggacttgttaaataaaactccaaacttaagtctgcttctaggaattgtatttatttatcgtttcaagtatatcttttcatactgactatgagtaaagcaaagcaatagattgtttgaaagtctatagtttatgatgagctttgtcttttcttttcttcttacttcaggctttgagttacacaggtagccacatgaaagtccacttacccagtttagtagagaatgaaatcctgaaagaggatggatcaataattaaaaggtttgggttagcatggggtgatgctttgccaactaacaccataaaaatttttccaattttaagaaaagaaggggagaatccctacatctaccctaaagaggatagaaaactgcctactctcctgtattataatactttggtcaagtaatggatctattgaagtatcatccctgaagtatcctcttgatacttcaaacataatactaagtcatagcaagaatgagactcacgcttacacagtctgactccctgggttttagcaagccatcaacttagttgaagccagcctgatggtattacattgtgtcgatagattcagagagcataggaagaagaatctaatcgatggatcacagattaattttgtgaccagctatattcagctcaatcttagtaaatcattactttgaatggtatgtgctttcttttaacagctgctttatgattctgcatgtgagtggccaataacataagcatgagtttgatatccatgaaacaaatatacctagcgatgctgaaacctggggctttaatgagttaagcaagtgtcatgaaagcagtaagcagcacatttttacgcttatacaagggggctgactgtgaggcacactggtctgcccaggtctctgttatggatttgatgtataaacttgggcactgttccacagatctactctggcttctcactggtcctctaacagcactgtaagtattgagattaataaaatgtgctcagcttctcggtgaaaagacacaatggaaatccaagttacaattgtgcttctcacttcattgaaaagggagaaagattgtcattcagagtatgctacagaactattttaagcctttagaacataataattagaacagcaaaattaaaggttctgtcacaattccacccaccaatcaaatgggaaaagagcagcagctaggaatttaaaagagtgtaattgctctctcagaacttaaaaaatgctacatgaattaaggataaaatgccttttatactctcaacttttaagtcttttattcaattattcagatgaaaccacataatccacgcatgcactaacatcatgggctcttcaaacaggaatagatttagagatcaattaatccaaagttctcaattacagctggtgaatttgaagccaggaatatagacaactccatagagtttccacagctagttagttatggaagctagttagttacagaactctatttatgatgtacaacatttattttatacattgttaaagatatcatatacatgtgcatattcagaaacacattggcctacatttgcctacacagaatatcacgaaatgtcctataatggaggcttaacccctggcatcaatgctataaaggcttctactagcttttagcagaaatagtcagaaaagtgcctttttgaagaaaaaaaaaatggctgccgcgtatttaggaaaacatcagatttcaatcattggaatcaaatttgaccttttcatcagcaagaacaaatttaagtttgcttccagatgcagaacaattcatatagtattaaaggaaaaaggggagtagaagaacataagggaagaaggaagaaggaaacaaggatgtccaaaaaaaagctgaaagtattttagctgaagtaagttatttttaaaaatcaggatgatcgtaacaaatgcatagaggtattggatgatggcagaacttccaacttctgaacaatgaaaacataaggaaaatgctgggtaaagctacaaaaactgatcatttcctatggcggttttaagtgtagatgcatagtgtatggttatggactcaggctctggaatctttgactcttggtcccactgtgtgctaattctgttattttttgtttggactattgcttaaattctcggagattcaatttctttatttgttatactagtgtctggcccatacaacacattcgtcaaatacttgtggaatgaggacccgcatttggaagtgtatagtgaaaaaggctgctctgcctatggagtagccattttttattcctttgctttcctaataaacttgcttttactttactctaaaaaaaaaaagaagaatatatagtgaaaagaattgagaatgagcaaattacttttaagtacagttacaggaaaatattagtatgacttaaaattaatatgactatacaaaagttatagctcctggcccaatgtggtggctcacacctgtaatcccaacactttgggaggccaaggtggacagatcatctgagctcaggagttcgagaccagcttggccaacatgacaaaaccctgtctctactaaagataccaaaaattagctgggtgtggtggcacacacctgtagtcccagctactcaggaggctgaggccagagaatcgcttgaacccgggaggcagaggttgcagtgagccaagatcgcaccaatgcactccagcctgggtgacagaacgagactccgtctcaagaaaaggtgttatagttccttttctcaagtaaccaccagtcttataagggaggcaagtaaacaacagactgttaaatggcaagaaatacacaaaatgagcaacatatgtgaggcttggagaatccggaggaagcagttgtctctcaatggcttttctcttttccccttcctcccccaccatctccatatgaagccttagagacctgggcagatcttcatcttttgttgggagccaccttcttatatattgatagactaatattttagtttttaaagacatatgcctcataaaaaacttctctgaaaacataattttgggaagtttgggtcagggtatgactgtaaggtttaagctggcagccaaggtgtttcaaataaattaaaaaaaggtttttttagcctgtcaaaaggtacttgtggtactatttcagaattaaccaaactctattaagtaagggctacttaatcaaaccatgaatgattttatggttagtttttgagaagatcaaattaaagcatggtttcatttattttaaatttttcttaaagatttaaaaaatactccttgttccaaaacacattttaaaaaaatctcatgaatcgtttgagagaggggagccatgtttaaaagaaagacacaaaaagatgtctatagtttgttatgctaatagtttgctgtggaaacatctaaaggtaagacattaggtactcagtgtaatggtcaccttcattcctaacagctgccctctggcagtgaaaagagcgtaattctctcttgtctgcttttctccaggacaacaatgagtaaagccatcacacagaagagggctgtggtgaaggaccagcatggaaaacgcattgacttggagcacctggaggatgtaccagaagcactagaccaggacgacctccagcgcgatctccagcagctccttcggcatttctgcaaggaggacttgaagcaagaggccaagtgaggggctgcccagttctcacaccagaaaccacacattcactcaatatgcagcttcctgtttcagtaggggagtgacctaactggcctaattaatgggataccccgacatttccactgttagcaaatatacggcattttgctttagttttcccccatcctctttaactataaagctaatttgtgaccaaagatggcatccttcatactggatgctgtatccaatactttgttgtgtctgtgctaacctgggaactggccacctccattgttctttgcttctgcacaagatccatgaaaatccattgatcagaagaacttcacctgcagacctcttcaagtgacactatgtaggaatccttccaaggaatatctatgtacaatgtatatagctgaaatgctcagatgaacaacatattaaaattaaaaccactgcctattgtaactacactgggcatcagaataaaaggcctctagaaattgctgaacaatggttaattaagatattgctaacacaatcgagtgataatacagttttactgcaaaagaagcacttcaaacctattatgtccttagaacttccagagtagccactgctcccagttaaaggtgggtcagtagccttgcagaactgtcctgagaagttattgctggtgctggccagccatggcttaggactccaacagccactctgagggaggggagaagggagcagaggccacgcagaatgaaccgatggggtattcagttgctggcagctacattgtgtggcattctagcatcttcaggtctttagatcttggacaagttggcagggtattttaaaagctataactactgtagttttccagttttcattgctgctttagcaaaccacgctgtcttacagtggtactttcttctggccactgcactgtagataattcattggaaacaagatttacccactacataaaaggttaaactccttcagtatgttggagtggtttctttttttttttctttctttcttttttttcttcaggtttatatcttctctaatacctgcatgtggcgtttaaaaatcaagaccacggtcaaacccctcttctaatcacattaattgtttccattctttttaccctgagtgagcacttttcactttccagctaggtctgtttttcagcttgcagacaagattgagaaatccttgaaaatttggttttggttaaaatttttggtttatttatttgaaatccacactcccttggaaactcttaagtgcatttgtgcacttctgtttgtttgtctcaaagaagggactgtaacaatctgagtaatttccatgtcctcttccttattcctctagtggttgaagctgtgtagcattttaacatatatatattcacaaatatattcatataaacagtatacattttgaatcagtcatttgttaaagaaaagtatattcaatgaagatgaaatttaaataaaaaaggacagagtctatcctccagggattgaacattttccaattatctggtcttttcctgttgtgcaaaaatgactcattgctccgaatgtcaaaaacaaatgcgacaaacaatggcacttcatcatttaaagtaatgttgccaagagaaaaaatttcctgggagggaggtttcccacaagccaaatctcctaagcctcaaatgctagcactttttggcagttggataggaaatgagacattctttggcagccaaaataagagaggccgatggtgaaactttttgagacaccctatggccttcttgtcaaaaccttcactggagctcaagaaaagcatttctgttgtgttatttgcagtgcagatgatgtctgtgtaacaacataatggttattcacctttttttgattttgatttttgctgtgttatcaaaaacttgaatactgtgagaagaagtgaattttcagttgacgaatcagcatcttgttcccatggtgataacactaattgaatatatctatgagggcatgtattagttaatggaaaaaaaaatacaacactaacaatacatagctgcaatgtgtacaatggctgatttaattaaataaaatgtacaagtgttaaatgtggcaa

SEQ ID NO: 160 - DNA, 3198 bp, Homo sapiens
cacacaacaactcttccccgctgagaggagacagccagtgcgactccaccctccagctcgacggcagccgccccggccgacagccccgagacgacagcccggcgcgtcccggtccccacctccgaccaccgccagcgctccaggccccgccgctccccgctcgccgccaccgcgccctccgctccgcccgcagtgccaaccatgaccgccgccagtatgggccccgtccgcgtcgccttcgtggtcctcctcgccctctgcagccgggtaagcgccgggagcccccgctgcggccggcggctgccagggagggactcggggccggccggggagggcgtgcgcgccgaccgagcgccgctgaccgccctgtcctccctgcagccggccgtcggccagaactgcagcgggccgtgccggtgcccggacgagccggcgccgcgctgcccggcgggcgtgagcctcgtgctggacggctgcggctgctgccgcgtctgcgccaagcagctgggcgagctgtgcaccgagcgcgacccatgcgacccgcacaagggcctattctgtcacttcggctccccggccaaccgcaagatcggcgtgtgcaccggtaagacccgcagcccccaccgctaggtgtccggccgcctcctccctcacgcccacccgcccgctggaaaaagaaaccgctcggactgagtttctttctccagctgctgccagcccgccccctgcagcccagatcccaactcgcatccctgacgctctggatgtgagagtgccccaatgcctgacctctgcatcccccacccctctcttcccttcctcttctccagccaaagatggtgctccctgcatcttcggtggtacggtgtaccgcagcggagagtccttccagagcagctgcaagtaccagtgcacgtgcctggacggggcggtgggctgcatgcccctgtgcagcatggacgttcgtctgcccagccctgactgccccttcccgaggagggtcaagctgcccgggaaatgctgcgaggagtgggtgtgtgacgagcccaaggaccaaaccgtggttgggcctgccctcgcgggtgagtcgagtcttcctctaagtcagggtcgtgattctctcccagggagggagtcctaactgtgccgaccgaacgggggaaataccttatccaggcgttttacatggtgtttgtgtgctctgctctcgcagcttaccgactggaagacacgtttggcccagacccaactatgattagagccaactgcctggtccagaccacagagtggagcgcctgttccaagacctgtgggatgggcatctccacccgggttaccaatgacaacgcctcctgcaggctagagaagcagagccgcctgtgcatggtcaggccttgcgaagctgacctggaagagaacattaaggtacatgttctgctcctattaactatttttcacaggaaaaacagtggataggacccaacttagggctcttgccacgcttgttagtataagcccgttatctccaaaactatctaaccattgagctgttttgctggaatgagagcttgtgtaatagcaaccaccagttttccactacgaaatcttccacagggttagttaattcaagacattccaagagaggctctggctatttttggacatagcaaatgagactcaaacttcctcccctcaaaatataaacagaagtcagacaacagaagactaaaacacagagggttgaagaaagccactcctcttgtagagtcgctgatttttttttttcctctctcttttcccttgtcttccttagaagggcaaaaagtgcatccgtactcccaaaatctccaagcctatcaagtttgagctttctggctgcaccagcatgaagacataccgagctaaattctgtggagtatgtaccgacggccgatgctgcaccccccacagaaccaccaccctgccggtggagttcaagtgccctgacggcgaggtcatgaagaagaacatgatgttcatcaagacctgtgcctgccattacaactgtcccggagacaatgacatctttgaatcgctgtactacaggaagatgtacggagacatggcatgaagccagagagtgagagacattaactcattagactggaacttgaactgattcacatctcatttttccgtaaaaatgatttcagtagcacaagttatttaaatctgtttttctaactgggggaaaagattcccacccaattcaaaacattgtgccatgtcaaacaaatagtctatcaaccccagacactggtttgaagaatgttaagacttgacagtggaactacattagtacacagcaccagaatgtatattaaggtgtggctttaggagcagtgggagggtaccagcagaaaggttagtatcatcagatagcatcttatacgagtaatatgcctgctatttgaagtgtaattgagaaggaaaattttagcgtgctcactgacctgcctgtagccccagtgacagctaggatgtgcattctccagccatcaagagactgagtcaagttgttccttaagtcagaacagcagactcagctctgacattctgattcgaatgacactgttcaggaatcggaatcctgtcgattagactggacagcttgtggcaagtgaatttgcctgtaacaagccagattttttaaaatttatattgtaaatattgtgtgtgtgtgtgtgtgtgtatatatatatatatgtacagttatctaagttaatttaaagttgtttgtgcctttttatttttgtttttaatgctttgatatttcaatgttagcctcaatttctgaacaccataggtagaatgtaaagcttgtctgatcgttcaaagcatgaaatggatacttatatggaaattctgctcagatagaatgacagtccgtcaaaacagattgtttgcaaaggggaggcatcagtgtccttggcaggctgatttctaggtaggaaatgtggtagcctcacttttaatgaacaaatggcctttattaaaaactgagtgactctatatagctgatcagttttttcacctggaagcatttgtttctactttgatatgactgtttttcggacagtttatttgttgagagtgtgaccaaaagttacatgtttgcacctttctagttgaaaataaagtgtatattttttctataaa

SEQ ID NO: 161 - DNA, 249644 bp, Homo sapiens
agcgctgagtcccagaaaaacagagcggggccagctgcagcgtgtagtgcgagtggggcggacgcgcgcagcccgcccgcccggcgaccagcaaggtaagcccgcgctcgcccgcccggccgcgcttgcccgctcggcggcggcagcgccgggggtgtgcgcggctcggcccccgcgggcggcgcctttgttccgcgctcggaggaggcgcatttaaagggccagctgttggagggacttgggggaccccctcccccagagcatccccccatgggcacagggaaagcggtggtccctcgcggccgaaccgtccatcctgcctgctcggcgaatccccagtctttcaaggaaagttccccagggtgcggaggatctgggggcttccagggttgggggtttttaaatttccttttttggtgggtgtggggtagtacgatcatggcctctgctaggagagaatgtccgcccgtctcagggtggctgcaatttgggtgggtggaggagacatcaaagcccgaatgggtttgtgctgtaaagtgaaactaccgaggaggggcacctctgcagcagccagaggaaggcggagggagcgagcggcgggatggaggcatctcaggtgtgttcattcatcagcatcccctggagagggcggcgggaggggcgcaaggacgacgcggttggccggacccgcctgaatgaacggggactagtatgcgccggggacacggcgcctgcccgtgccgcccgtgccccttcttctccccgagtggctgacagcatcttgctaggcagctcatcaccgacatggacagcaagcaactcctttctccgaattccccgggcatcccctgctaccacctcgctgctttccgatgtggcttccttgatacgtggtagcgccattcaagatagaggggaaagaggcttgaagtcattatgtttccttcatgggggaatgtgctgtcgaattctgcatccccatgcatccgctgtcgtaagatggctttgaaattcaccagtgcatgctttctccaggcagacaagaatttattacgctattacattgctacgtaaaagcagaagggatcccactgagcatggctcgttttgttcagtcctcggtttttcccagcatgttctgggcgagcctttggatttttgttttaaacactgagcgttgggatgcccctgttgtcacagggccgacctgctgaaattgctggaattggtttcatcgtcaataggagggaggttcatctagagacatcatggaacctatctggcgtgtcaggcctctgactccatctctcccctcaacacccccccccccgcccagccccccgcgcccttttttcctcttaagtggaggcgggggatggattggctgtcttcactctccttgtgttttgagctcctctgcttagattcaattctgtggttttggttggaaaggtatcttggtggtgatcgaagagaggagggttggattaaaagtggggtggacacagaggggtcagcagcatcaatgacagaagacagatgatggacatatctacagccttcagacaccgatgaggcagatggctgtctacagagtgaggggcgtgtgtttgggctgtgagggggaggggtggaggaggaggatgcctccagcagttttctgccccgccctctggatgctgccttaaatagccccttgccaaccaagctctgatgtctctttcttggcctgaggggaaagaagggaagggttggtctgttggcacctttgcccaaggcactgttggagcagatggttaggaaagggttagttctccaggggttgcagagagcacatttctcagctggagggccctgagaccactcctttggcgacttccctgcagggaattagcaactgaaatgaactgctgtctaccctgtggggtaaagagttgggagggtattgtcatcttgtggacgatacccgccttgttggccttttccttctcctacctgctttcatttgttgtagttggagagtttctgtatacttttcggaagagattgggcatattggggagtgggtaggagttatgggaaaggatgagcaaattcttcctggcagaacaaagcactgttcagctgttcctctctttccccttctctaaaataagagttcaatacagatagcagagtctagggttttctttgtaaacaatgaaagggcagggccaggaaagaaagtttttattgtgcagcattgataatgatcaggtcatcctaacttatctccagacccttccctggatgtggagatagatttgctgtagagggcactctatggtaatttaggatttgacctgtctctaggagaaaggcatggatggtctcaaaaagctttggtggagaagctctggaccagaggcaggacagctagctttggtcctggccaccaatctttgggctttgggctagtggcttctgctctctgggcctgtgtccttgctggtgaagtggaggatgatagggcagaaggtcttccagggttcctgacaactccactgttcttagagtcacagtttgtgatggcattttcaggttctttcctgtttgctaaattgataataaattcaaagtattgcacaatggcatagaagaagcattctaggatgcaggcttctgttggattcacatctaccttttccttgattagtgtgatttgtgaggttttactgtaagtatgtaaacaattcagagctagaacggtccagagtgagaggcacagaccccagagtgagtggttgtgggagatgagggtgggatgatagattgctgaggaaagggagtttctgtaatttgttctctttccctgtggatgtttaacttgctggtttattcatggttacacaggtgaacgtttacctatctagaagatgagagttataaaagacctctgtgattgccatgttcctcccccttccccgccaaactgaggaatttgaggggttgggaggtttggccatttttccaaggttgcacagctagcaagatgtggagctggggtgggaactcggggggatagattgtagatcttgtttccagatgtatctgggtttttttgttttttggtggtggtggttgttttgagacagggtctcacctgtcacccaggctggagtgcagtggcacaatcatggctcactgcagcctcgacctcctgggcccaggcagtcctcctacctcagcctcccgagtagctgggaccacaggcacgcactaccacacccagctaatttttgtactttttgtagagacagagttttgcggtgttgcccaggctggtctcaaactcctggactcaagcgatccgcctgcattggccttccagcatgctggggttataggcttgagccacggtgcccggcctatatgtatctgttaagccccctcttcctctgagagaaatgattctaagatggaatagcgaaacatgaggaggaaataggagcacaagaagagagagattggagaaacagacgagaaagtaggaggctggggacagattatgtggggaagggaaaaacacagaaaccaagcttggaggagaaaaggatggagcttgaaagggggaggctctattgtctctgaaacagctgagctcttctgcagcccttggggtgaagtgaggggaggtttggtagcctaggatggggggtgggggggtggactgagagttcaacctcagcctgagactgtcttggaatctccttgggattgctcctgttgaccctcagattgcaaagtgtcatggaggctgcttagtttcaggaccaactgaggcctttagatccacgggagcatgcagaatgtggacatgtgggaagtcaggtgtgcgggtggtgatgctggctgatgctgaggtgggactcagttctgctgaagtcccggtttttttgtaaatgcaaaactcagaacacttttccatggatttcgtttcagtgcaagcagcattttctccttggattttcatcggtgctttgaatgttttatgagatagtgtttcgaatactcccttttcagaggagatacttggagatgaatgatttactgaattgtagctcatttgggggagcttctggcttgtgacctaagctaagcctcagaatgtttcaatgagcaattaaagagctgtgaacagtggttgaccagagcactaaccattcaaaggcaaggataaaaggtgataatagttcaaggtctggagctacagccaacagctggccatgaacaatgtaactgactttggctaactcttcaagccctagaaagtgtctctgtgggtcctttggtggctccccctttttgtgtgcggttaggcatgtggacccgtccctgaatcttgctgtctcccattcttcttttgctacatctccctccactatccatttctttttcttacctctttctccttgccctcctccctcattctttctttattatcaacaatatatctttgtagtttcttttaatctattgccattaaaatttcatgttctctgttcttcatttcaaatcagtcgagggccaggcaaggtagctcatgcctgttatccgagcactttgggaggctgaagcaggtggatcacctgacgtcaggagttcaagaccagcctggtcaacatggtgaaaccccgtctctactaaaaatacaaaaatttagccgggtgtggtggcaggcacctgtagtcccagctactcgggaagctgaggcaggagaatggcatgaacctgggaggcggagcttgcagtgagccaagatcgcgccactgcaccccagcctgggcgacatagcaagactccgtctcaaaaaaaaaaaaaaaaaaaaaagacaaaaattagctgggtgtggtgatgggtgcctgtaatcccagctactcaggaggctgaggcagaaagaattgcttgagcctgggaggtggaggttgcagtgagccgagattgtaccactgcactccagcctgggggacagagtgagactccatccaaataaataaataaataaaatcagttgaattcagtcttttttgaatgtgtatgtgttttacacacaaaacaaaaaagaggcaaatgaaccaaatccaactaaattgctttttacttctgtgtggccttccattgatttatccccccacttcttctgtggtcagcagtggctttttatagaaaaaaaagttcccaggtctctgtcatgcggttattgttttcacaacaatagaaaaaagtttccacccttgtattgtggaccacaagggacaccctctctcaagggatgtaccctgtttctagacttccttccatggaaaaagtgtctttaatgcattctgtaacagaggcctgtactgtaaggggttaggggtgctgatagtggaggtggggctcttctcagtgactgcggtactgcttagaataggggctggcgggctatggcctagagagtatatctaggaagaattagcatcgttgttttctctgtttcctcaggctgagctaacctaactggctgtagcaggacccagacccttttggaaaagaatgagatgcttgttaactttctgattagtgttgagtgggacccaaggtatgtcttctgcccaccttgggagggtgggcacccaccgacagttgctggtgtaaagttcccggattctttgatggatggatgctgtaccgctttatgattttcttctgactctaattagttacagagaggattgactcttgatgctcagtggtcagcaagtactttagtatctaaagtgggccttgcaaacaagaagtcaccttgtcacattaggtttgtattctctgtaatatatgtgtactggttttagtataaaagtatttaagttgctttactgttgaatacaattgacgttctacgaaaatgtgtttattgtgggccctcatttgtaccagccctctgtaaatatgcatatcagtctcataccccaactggagaagccggggatagggtaggcatcaaacctgctggtgctgagaaccacccctccatgctttcctgctggctctgccaaaccaccagatgcccggtcattccctactccacgtccccaaaggccaggcccccctgcaccccccaccaggactggttccctcaccagaaggcctttttctgcgtttcctggctgatgccttctcccctcagactcccctcacatcttaaagagatgcctttcagctgggcgcggtagctgtaatcccagcactttgggaggccgaggcaggtggatcacctgaggtcaggagttcgcgaccagcctggccaacatggtgaaacctcctctctactaaaagtacaaaaaattagccgggcgtggtggcgcatgcctgtagtcccagctactcaggaggcttaggcaggagagtcacttgaacccggaaggtagaggttgcagtgagccgagatcacgccattgcactccagcctgggtaacaagagcgaaactccatctcaaaaaaaaaaaaaacaaacaaaaaaagagatgcctttcttcttgtgttcagctttctacttctgttgatattgctggttcccttgtctgtttcctcccccatattgtgagttctgggaatagagtgagtctgtgtttcttctctttttaaattaaattttaatttgtataaaactttcgcgtgtgtgtgtgtgtgtgtgtgtgtgtacacagagagtttcttttttgtttgttttgagacagagtctccctctgttgcttaggctggagtgcagtggcatgatctcagctcactgcaacctctacctcccgggttcaagcgattctcctgcctcagcctccctagtatctgggactacaggagaccaccacccccccagctaatttttttattattagtagagacagggtttcacagtgttggccaggctggtctcgaactcctgacctcaagtgatctgcctgtcttggcctccctaagtgctgggattacaggcctgagccactgtgcacccccaccccgcacagagttttgaaagacaaataggctgggtgtggtggctcacgcctgtaatcccagcactttgggaggctgaggtgggcggatcacctgaggtcaggagtttgagaccagcctggccaacatggcaaaatcccatctctactaaaaaaatacaaaaattagccagtcacggtggcgggcgcctgtaatcccagttaatctggaggctgaggcaggagaatcacttgaaccagggaggcggaagttgcagcgagctgagattgtgccactgcactccagcctgggcaacagagccagactccctctcaaaaaaaaaaaaaaaaaaaagtcaatactactagaaaaatataaaggctgcctgggcgcagtggctcattcctgtaatcgtagcagtttgggaggctgaggccggcggatcacttaaggccaggagttcaagatcagcctggccaacatagtaaaaccttatctctgcaaaaaatacaaagaattagccaggcatggcagttaggatatagacatccttgaggggctgctgttactctgtttacaacagttacttctaatgcactgagctgtttctcctgatattactatcatatttattgttacctgcttacaatgctgttttctgattgtccattttagatgttatttttatttttccttatttttctttttgtagagacagggtcttgctatgttgagaccctgcttgaggccagggtggactttaactcctggcctgaagcactcctcctacctgggcctcctaaagttctgggattacaggtgtgagtcaccatgcccagcttagaggttacttttagatgttatgtcttgatgtcttactatggattagatcctctcctctgccccccaatacttccctttctccctatcctctcattatagatatatcacagtttttgattacattgatatttggtgcttacattattttggctgtgtaaatagtgttcatgacagagccatatagtatactataatattttctttcttgtacattttttgagttaataattatcttacattttctatttacttagtttctatgtacttattgctaattctcaaagtatttgacagcatcttaagacatttgttttataacatgtgttcctatttatttatttatttattgagatagggccttgctctgtccaccaggctagagtgcagaggtgcgattgtagctcattgcagccttgacctcctgggctcaagtgatcctcctgcctcagcctcctgagtagctaggactacaggcaccaccatgtccagctaatttttaaagttttttggtagagatggggtttcactacattgcctaggctggtctctaactcctgccctcaaacaatcctccctcctcaacttctcaaagtgctaggattacaggcatgagccaccgtgcctgcgcttgttcctttttattttattactgtttttttttttttacgcccgcttggagacttccctcctataggcctccattctgtctcctttgttcttgcccattgacctctaggcctgtggcatgactcatcctgggaattccctcaccttatcctgggtgggatcctgtttcctttgttgatttattcttccacaagtttctgagagagggtctgtggaagttgatcactttaagcttacaggtctgaaaatgttcatattctacattcatattcgattggtgatttgattcatctagaatttgaagtcgaaagccatttcccttagaattttgaagccatcattccactgtcatctaggttctaatattggtatcaaaattcggataccattctgattcttgatcatttatggataacctgatttctcactgaaagtttttgggatcttctctcttttcctgtatttgaaatctccttgctttaaaaatgattggcctgggtctttggtgtgggccttttttttttttttttttgagatggagtctcactctgttgcccaggctggagtgcagtggtgcaatctcggctcactgcaacctccgcctcccgggttcaagcgattctcgtgccttagcctcccaagtatctgggattacaggcgcatgccaccacgcccagctaatttttgcattgttagtagagatgggggtttcaccacgttggccaggctggtctcaaattccagacctcaggtgatccacccgccacgggctcccaaaatgctgggattacgggtgtgagccactgcgtccagccggtgtgtgcctttttgatctgaagattgacgtctttcagtttggggaaattttcttaattagatatattttaataatttcattttctccattttctgtgttttgtctttggcatgcctattagctgaatgttggacttcctggagcaagtttataattttaaaacattttatttccttttttcattttattatatttttgtctttcagagagctatcttcagctttatcttcaactcttttccatttttaactgtgctttcatgtgtttacgtggaacatatttgcatgttttactttgtaagagctccctagttctctgaatacttgcttttcttttttagatgacattctattcttgtttcatgggtacagtaaattcctttatattaagggttttgtttgtttgtttttgttttttttatggttttctgctgttccctgctgtcccttggaagatgttgtttcttccaagtccctttttccatttgttttggttactgtatcttccattgcagctatccttccatgcatgctgatccttgactgtctatgtatattttaagaatggacaccgaaatgctgattgggcatcagtgccacaaggaagggagtcgttaacttcattgtagagtgacccagcagagagccccctttttctctactggagcagcctagatatcagcgccggtagatctttttcctggggctttcctggatagggctttcttggagaggattttacctgggtgtggggtagggtggggtggggtggtaaacagcctggccttcctgcattctgggagcctccatggggaaaggggctaggtattagtctgtttgatatgcagactttcactcaatccctgggtcttttgaaagttgcccccacctgccatccctctctcccatctctctacctccctcagctgtgtccctcccttggctgtatctctggtgtaagttacctgatcagtggatctccaccttctgctagctgaggcagggaaatcaccaggctgagcagactgcaagagggaccctgggtctgactgctctttgtaccaacttgcaggcaggcacccttctttttagctttaccctgcttttccctttagagtccttggtgcctccacttcctgaactgtctttgtgttctgtgccatgagttgggcacttgtttagtggctcctgctctgcttgcacttagcagagcagacaatgcggaaacctaaatcagctactgcatggtggtcagctctccactgctgttgacatatctcatctgctggggtctcttttttcattaagaaatgcatccgtctactgtccttttagtgggagtccagaagagagcagagataaacatgggtgttcagctctctgatttgaccaaaagtttgtttcatttcttcattcacacacttaaatttgtgcctgatatagagtatattctcaagaagtgtttgttaaatgattgaaagcccgttcctaggatgatatgcgtacatttagtcatcagatttcaagacacccaaacatacagtgttgcaaaaataaatccgtcgcttattctgagatagacataataataggcagcagatcctgcctattctccccatgcagtggaggataagacgcactgggagggagacagtgttacagagtgttgctgtcttcagccctgtcagtaactacctgagtcactttgagaagtcccttaacctatctgggccttggttttcccagccttaaaatgagatgttggtcaaggtttgattcagttctctgcattgagcacctgctgtgtgcaagccacggtgctaggattctctacgtgtctcttctaaggcagccactgtggtgttttgtatgtatgtttgttttggcatgggccacactgagttgattgtgtttggtttatatgtctttctcctggcttagttcagtgccttgtacaaagtaagtcctctgcacattttgactctccctttttctaaaccgagggctccttgtgagtatcacgtcgccatcctctgtatctcctgtgtctatcacagttgttggtacataggaggtatgtaggaaatatgaaaatgtgagttgttctgccagaatccccagaccctgcttggagaacaagcctagcttgttgagggcctagctgcacgttccctggcccacttatggagttgggggactcaaatgcattggtattaaaatcaatggagacagcaattctggaccacagccttgacactagaggattgttttctcccaaacagatagtagtcatatattcatttcaaacagcacagtggagcggagaaagacttgttaccagttaagatcagattcatcttaaccatgaaaatgaattatagatgtatccctgcattcaggtgtttaaaaacatttaagtgttttttcataacttcttttggttttcccacacttctgagtttatgtgccaggactagtaactagaaattttagggatattgatttagctcagtggaagatattttttattgtaagagcaactccctaccagactgcattaggaagccctgaattctgtgtcaagccaaggctaaatgtccactctccagggaacatgaagaatcaatgcctgtgtgggagatgaggtactattagagcacctgaaaagtcctttgcttttgatttgttcatcaaatagttattgagcaccggttatagaccagcgtccatgctgggctctgggaatatagcagcgaacaaagagaaatggcaccttccctcttggaatttatagactagagctgagctgtccagtatagtagctagtagccacatgtggctattgaaattaattagattgaaataccgttaaaaattcagcttctcggtcatgctagccacaaatgctctgtaggcacgtgtggctagtgactgccctacggtcggcatgggcagttgtagagtgtttctgtaatctcaggaggaactcttaggcaggctgatcatagagctaagattctgtgtttctagacccgacatttatgattagcatttcatggtggaggcaactgaggcacagaaaagccatttgtttaagactgagctaggaacaggtctcttatctttgagtgtggctcttctctccctgaggtgaggtagggcaactgagagtatagtctttgcactcaggctgcctgggttcaaatcctggctttgctacttcctagatttaggtcttagggcaagtcactgccctgtgcctcagttgtatcacctgtgaaatggaggaagtaatagcacctatctcacaggattgcagggaggattagatgacccagtcattcaagtctttagaactatgggctgggcctggtggctcacacctgtaatcccagcactttgggaggtcgaggtgggagagtcagttgagcctaggagttcgagaccagcctgggcaacatagggagacccccatctctacaaaaacttgaaaaattagctgggtgtggtggtgcaagcctgtagtcccagctacttggaaggctgaggtgggaggatctcttgagcctgggaggttgagcctgcagtgagccaagatcacagtactataccactccagcctgggcaacagagcaagactccaactcaaaaaaaaaaaaaaaaaaaaaaggaaagaaaagaactatgcatgacacataagtagtaataattcagtaaattctggttactattattgagactgagaaggggacagaagatagtgggagagccaaggaggcattttcaaacagcagagtggagtggagaaagactgttaggaaaggctatgcttgtagagctgactgaccacctggggagggatacgtaatggaatgtttctcagccaggggctgctttagtcatgtgagctgatgtgaaaatgccagtatgtccatgaagtcctctgagtgtcacaactggtcactggtcctctgaataaggatcctttcagtatctcctttctcctggcttgcctgcacataggctggtccccacacccctttcccctgtccccatgcatttcttctcccctcactacatctccatcatggaatgggtgggacatttaccatcacccctgtggagcagcgggctgcatcgaaggaatgcagaagagagcagggacagaagcccagctgggccctggtattttcttggaggtttgcatctcttgttggtgtcattccctctgttgctcagtctttcacagtgttttaggggtgccccattttgctgcatgaggagaaagagagctctgatgttagccccagggatgggagggtgccccattgggtaggtaaatctctgcttatatgtggaactttggcttaagaaatactttatttatttattttttgagatggcattttgctcttgtcacctatgctggcatgcaatggcgcgatctcggctcactgcaacctctgcttcccgggttcaacctcagccttttgagtagttgggcttataggtgcccgccaccacacccggctaattttttgtatttttagtagagatggggtttcaccatgttggccatgctggtcttggtctcctgacctcaggtgatacaccccctcggcctcccaaagtgctgggattataggtatgagccactgtgctcagccaagaagtagtttaacagagcagtctcatcaacactgtagacatgggccccaccctgcaggtgtttatttcttcatgaacacccagagggcagggctcttgtcttccacaacagacatcaacagtgcatttcaggctatgaaataggaaggttctagtatgatacagtgcgtgtggaggtgcaggtagtgagggtgctctagaggtacataatggatgtggcaccttgcctcagccaggggaggcacacagggaaagtactataataggccagtgatgtatctgaggtcaggtgtctagtagtggcagaccctgagctgacctgtgaggagactgttcctagcaagcctgattctcagcatggcatagaaatacaggttctccctgagtaccagtgatcaggagtattgagtgcttggccgggtgcggtggcttacgcctataatcctggcactttgggaggctgaggtgaatggatcacctgaactcaggagtttgagaccagcctgggcaatatggtgaaaccctttctctaataaaatttaaaaaatttgcaggtgtggtggcacgcgcctgtagtcccagctgttcgggaggctgagggatgagaatcgcttgaacccaggaggcagatgttgcagtgagcagagatcatgccactgcactctagcctgggcgacagagcaagactctgtctcaaaaacaaacaaaaaaagaagtattgagtgcttgaggcttcacctatggtacagtttggatgtgtgtccccactcaaatctcatattgaaacataattcctaatgttggaggggggcctggtgggaggggattggattgtaggggcagtttctcatgagtggtttagtatcatcctgttggtactgtcctcatgatagtgagtgagttcttgtgagacctggtcatttaacagtgtgcagcccctccctctttgctcttttgctcctgccctggccatgtgacatgcctgctccatgcctgctcctccttcaccttctgccttgattgtcagtttcctgaggcctccctagaagccgagcagatgccagcatcatgcttcctgtacagcctgcagaaccatgaaccaattaaacctctcttgtttataaattacctagtctcaggtatttctttatagcaatgcaagaaaggactgatacagcctgtaactggctttgccaatccattcttgtttgggccttgatgttccatcatcttgggtggtggtctagcttataacagttatgataggaatgggtgcttagtagatcccggaattgttcttctgtttgcatgtcagtgtgaaagctcattacacatttatataatagcttatgcattgatcattaacatcaacctgtgggctgacctcggtttcctagtatgaaaggccactaggacataccttgtgaaattcagtttctcttattgcctggagtctgtgtggaacctggtggctgagcatatgagcagtatgtctgatgtgtaaaaagataattcatttgcatattgcttttctccacttagaatttatcttcagttggggcagatccagtgttgggtgactgtttcctgtgagcatggaattatggccaggggttgtaattgcttataacaaattgacagggaggaaaatgggactgtttgcctggtacgttgatgtaagggagtctttccagtgctgctgtaagatatacagtgctgagtcttctgggcttgggcctttgtttctctcccttttttttttttttcaagatggagtttcactctgccacccaggctggagtacagtggcatgatcttggctcactgtagcctccgcctcctgggttcaagcgattctcctgcctcagcctcctgagtagctgggactacaggcgcctgccaacactcccggctactttttttgtttttaatagaggcagggtttcaccatgttgaccaggctggtctcgaactcctgatctgcccacctcggccttccgaagtgctgggattataggtgtgagcgaccacagggcctttctttgtagacagtgcacacaggaggctggcgataggagactgggcagagtctagaagccagggatgaggtaagaaaggctggaactggagctgggagatctgagttgctgccccagtggccttgccagtggggaatctgggtggagaggtgaggcaggagtgggaactgcttttaagcaggacaaagtgaatagaggctctggagaaggaaagcaaaatcccaacagggacagaaatgagagtagctggagaaagctggagcttgggagagctgagggcctaagcagggtttggtggttgctgaaaatcaagttgccaggcccatgaaccgaggccaaggcaatgttaggccttttaggactattttgtgtttgctttgcagggcctctatgttggacgtggtacattagtgagccagcaatggcaggtgtgagggggcgaggccccctaggaactgggaaatattagtcatgcctgagcactgttagaagatacggcttctcatcaagacagctgctccgggaggagggtctgcagccgccagcctgcattacagtttatgttcttggttttgtctttaattattaaaggcacgggctatttaaatactcacctgaagcatcattgtgagtaattttcccttcctggggtcaaaggagctccagcagggaaggggtttggtggcctatggttctgggttctccaggtgcttccctcaaggaatgcaaggatgtcatgaggacgttgtaagatgcccttgacagtagggtgcagacctccctgggctgtcttgcagattggcatttattttgagtgagtccttaatttgaggagtatagggtgttcccttttatcataggcaaggaagaaacagtgctgttagaagatgtaaaatatttaacactctctttaaaaaattaactgtccaggaacctttgattgctggtgcctatggcaacatgcatggttttcaggagtgtcttctcggagtccctgggctcctcagaaggggtgatatgggggtccatgggttaggggtgatgtgagggtccagtcttgggagggctggctgggaggccaagagcccacctgttctgcttggcttagaggctgggcagtagcagggctgagccactgcctcagagggtggtagtcgggggtggtctgttttgacaagtggagaggagtgaaggggagaaggagagctcgccatccttcttgggcttgctgagtttatgcatttgttttgttttactggcctctgttagtccctggtgcctaccgttctccgtccagcctcaggacttttgcgcatgtggtttccttagcctggaatgtaaagggagccttccttcctgacctggttcgtgcctcttacccctcagatctcacctggagcgtcatgttctggggaaattatctctggccctgcttcctaggtgacactctcctgtttgagggctcttatggttcggtggtctttgttacacttttttggaaaatcattgtttgcccaccctaccagcctgtagggttatgacaacagtggccagggctctttcttgtcaccagtatgtccccagtacctagcacgggcctggcctacagaggggccccactatctgttaagtaaattaattcattttttcatttattatgttttgggttcggtagagatcctgggaatacaacgagaatgaaacacccctgctgtcctcaccgagctcctaaactagagcagtagataagcagtgctcaagatagccattgagggcaggaagaaagctttatcagttggagttctgtttatgctttaactaaaggaaagacttagctttcctatttataggagtacagatttataattactttgtaagtatcctcaaaactatttcacaaataggaaggtgtgatcaaaaagtttggagactactggtctgaagggagaggtaggaaaatgaaagggtttttttgtttgtttgttttttgttttgttttgttttgttttttgagacagagtttctctcttgttgcccaggctggagtacaatggtgcgatcttagctcactgcaaccttcgcctcccaggttcaagtgattctcctggctcagcctcctgagtagctaggattatagtcgaaagggtttttatgccaaagtgtgatgaacaatatgttagggcaagtacagggtgccatgagggcatgtgggttggggggtgagctggaatccaaccagaggacagagggaccggcacatgcaagggcaggcttagtggattgggagaagggcacatactttagtaaggcaggaggagggcttgctactgggattgggaggggttaagagttaggattactaagagagatgagactgggcccctgcctgcagcatgggcatagtctagcagtggtgcaaatgtgccttaggagagacacagcatgaggaatacttggcattcagaagagggtatatattttgcttagcagggatcgggcctggtcatgctttaaaaatggaacatgctcaagatcacagaggcccctctcttcattgtagaaggggaagaggagggtgctggaggttgacttcaaggctctttaaagcccatctcaggagaatgacattctccttggtctcctgctacccagtgggatttttatcctaatgtgatttagacccctcctcaggttttattctgcaggttacaacattgtataggaacaagaaaatggcgtatggtatatgtaaataagcatatttggtgtgtttacttacctgtgtaatcacgcacactcccttcttttctttgtttgttttcaagtcccagggcttgaagtaattacgtaattagaatccacaaagagtatggcgagataaggtgtaattaaagaggaaagcctaattttggaagaatgataagaggtcatttgactcagtctgggcccaaatccaatcttggaagaacagtgagaggtcatttggatgtaggcagcttgaggccacccaggagcccagactggcctcagaattggacagattctgtttcagttcactgtgaaagccactcattgagcatcctcttggtatagggtattgtgggaggcccagctatgagtaaggaacagaagtcctagatctcagggaggacatggggaaatagggcctgagagtaaagtggagagatggctcctggggacagggtggggggcggtgtggggaaggattcacagaacaggtagcatttaacttgtgctttgaaatgtaaggagggtttcaagaacatggacaagaactttctgggtctattggagacactcagataatatttgtgggatgaatgccaggctgaggttggaggcagaaggaacatggccatattggtggatggtcattttgcagtttggtgatgaggtcaagcttgtacagctcagacagtgtagtgacaactcacagccaggaggccaacaggcttaggccctgagtgtgtagtgaggattgtgtgcagaggagtcagagagcactgcgggggtcatgggaggcctccttgtggagggaaacttggacagagccttgaaggaccaataggagggaggaaaggggagaaggaaggaccctccaaaggaagggaatgacatgggtacctagagagggattagagaggagataatccccgcaagaggggaggggtacataggggagcagggtgaaaccagcttggcaggggtgggtaagactggtttctgggggttgggcatgttgggcaggacaggattgatccagtgggatagaggagccatggcagattgttggacaggtgagtggcatgaaaaaggcatgttagggccagaggaatctggccctggtgggtgggatgggctctggggagctcagcctcagctcctgggcatgaggtggtagggaccaggcagtaggcttgggaggttggggccctctgcagtttcttatcacggaagggttctggtcttggatgagagaaataaggcaagggaggagctggaggtatttgcaaggtcccagcctgggagaatggagatacttgagacaggaggggtacccgctgttggggaaagagggcgtgagtggggacttggtatgttgagggccccaagatccctcttctaacccccagttgtgatctagtggagagacctcaggccagtcccttcatctcctgagctccatttcattgtcagcaggagtcactgcctttacggttccatctcatctcagtgcagtcattgcagccctgggctcaggcaaggggaagggtctaggctgaggatttgtgaggccatcccttagaggtgagaggagaaacacattgtcctgttccttgttctcctggagtgagcaggagcctgggggagggcctctggctgaccagcttggatgaggagttgtggggaagaaggggctgtcctgactcaaccagcccatctcagggtggttttgagactctttgacgaaggggtgtatgaattctaagtttatgcagatgttgaggtatgtgcactattctggggcacagcagggaaggggttaatcttcctgaatttgcagaaaggaaattctcaaggtagggaactgatggctagtgacctcctacctaacctccacaaagctagtctttgggaaacttaaggccttcggtctttagagacagagtctacagggagggcttcctggcagaggaggacttggacagagccatgaaggatgaatagtatgtgagaaaggagagaagaaagaactttccagaatgacatggagttatagtacaaaattcacagaagagattccagaaaggaaggcatatgtttttgaatacctagtatgcctaccagctctgtttgtcaggtgctttcatgatctttgtcttgttatctttacaccatttctgcctctcttattagcccatgttacagataaggcagtaggattagaggggtgaaccactttgcccaaggtctcagtggtagggtgggatttcattttattcagatttctgactccaatggcaacaaatagccatgccactatattctgctggctctctgggaatataggaacaacagataatgatttgtctacatgactttattcccaagttaaacacttacctaaaacgcggctgcggctgccacccctgctgcagctttgcagtactgtgcaagaccttagaggccagtgatgggaggccgttagagctcctctgagtctgaaaccctcatttatagatgaggaaactgaggcccacaaaggagaagagaatgtgccaaggttaggggcagaatgggaatgagaactagaggagtctggagactttggcgcttgtggctgtttaaaggccccctaggctccctgtgtaaaagtatgtttttagacaacaatgggaacctttgtctggagggttggtctgaccagggttgaatatgaaagggtctgtgtgtatgtgtgtttctttcctttgctttaacctcagatacctttgaactagcaggaaggattctttcagaccaaaggttaagactaaaggcatttaacaggtggaaagagcataggaaggagggggaagatcagaagccacagaaatagaagactaaactccaggcttggataaaaggaattttccaagcctgtaaataatcactaacgtttattgaacacccactgtgccaggcagtctttacatgtcattttatgtaactgccatcgcttccccatgaggtaggtgctgtttaattgttcccattttgcagatgaaggaactgaggctccaagagtctaagtgacctatttaaagtcatggaattagtacaatgtagagccaggactccaactcaccagatcctaaactctccctttaactcccaaggcattttattggactaggtgctcccaggtgcctgagcatatgaggatatatgaaatagcaaacttagggaggtcatcctttggcaatggttctcatggggatgtggattttacccctaggagacatttggcagtgtctagagtcatttttggttgtcacaaatcttactggcatataataggtagaggccaagcatgcttccgaacatcttagagtggacaagatagctcctcgtaacagagttaccccatgcagaatgtcagcagtgctgaggttgagaaactctggcctttgggatcctggttgtatcgttaccactcagagcacagtgctagtggaaggtcccatctgaggaacttgagttgttgctttagctctagagacttaaattgtaccttactgaatatttatagtttgggtttgtcactgactgagacttgatgggccaaggtggggctagtggtgggtagaggctggaaagaaaaattctagcaaggtgtgaccagccatggtggcctagggctgcatcttagttgcagcaggtgagaggtggttggggtccactccaggctgctgagaattgatttgctcacttcatatgtaactgaaataagaattcagatgcagctaattgtgcttttgtaaaatttatttttatttttttgtgagacagggtcttgctttgtcacccaggctggagttcagtggcacaatcacagctcattgcagcctcaacctcctgggctcaagtgatcctcctggcttggcttcccaaaatgctgtaattgtgctattttttaaaaaaattaagttattgctctgactactcagcatcagaaacctccgaggaagggttacatgttgcagatacactcagatacaagtatgctgcttgccaaattcctctgttaccagttactgtttaatctaactcgagtcagcccctatccacttggagaatagcgcacaaatgtggggagccccaggacccttggcttttactggagcctcccatgctgaactggtcagtcagagcagcccgtctcctgagggcagtgctgaggaaaggggccactgcgttaccctgactgctgttgctttccgctccctcttccaggtcagacatggaaaggtggctctgtggacatatctcagatggtgacctccccaggcctaatttctgccccagcgcagccgctccctctgtaacactgattgagtgctagcactgccttgtcaagcatctgctgtggccacagacacataattatggccctgccttcaccttgccggccacttcctttctatcacctgggactcaccccaaggcctctttcatgaagctctctgatccctccaactaacagtgtcccttcacaagcacctttttttttttttggagacaaagtctcactctgtcccccaggctacagtgtagtggtgcgatcatggctcactgcagcctcaacctcctgggctcaagtgatcctcctacttcagcctcccaagtcactggactgcaggtgtgagccaccatgcttggctaattttttttggagagatggggtttcgccatgttgccaaggctggtctcgaactcctgagttcaagtgatccgtccaccttggccttgcagaatgctgggattacaggtgtgagccaccacaccggcctcttttggctttttatccagtcattaaattctgagtctttcctggatcaccttctgacctctccagtggcccagccactcactagctgtgtgaccgcaggtgaagcagcacagcactgaatcacttcccttccagcatcagggtggaatgagagtcatagttgtgggacctggggtgttgttcctctcaggtcagtggaaattcaggttctcctttgatctcatacagattaatggagaattgagaactagttgttagcaaactctcttcagattaagtaagtaagcttctttaatattaattcttcacctagcaaatgtttgttgagtacccgctctacccaggggcgtgtgataggtttagcaggggtgggaaatggacctctttggcctagccctcaaggagcttactacagccttgtggggtggtggttgtgtctgttcaaaaccataacagggtggcttctccagcatgtcactgtgtgtcttccttaggaccaattatcacggttatgtgagtgtgcatgcacctcccccaacacttgaattaaagtttcagggagatggaattttttcagtctttttcaccatgtgccataacaagcaggcagtacatatttgttggatgaatgcagtaatgaatgatactagttaaattctgttttgaatgcagggtgagatttagacctacctagatggataagggggcgttacagactggtggggatggggatgggtggaggcaggaggagggactgccgtgagcaaatggacagagacagtgaagcccaaggcatgctgggcacctgcaggcccactgtgattagaccatgtggcacagtcagaacgcaaaaagactgtgaagtaagtcggacccagatggtggagaatcttgaattcaagccgttagagggattggatttattctatatagtaggatgaccttgtggtccagtttcccagggtgcttcgtcccaatgtgactattactagtgcccccttttcctcttaagtgtccctgcttggatgataaattacatggtcttgcaatcctcaaggccatatggcacccctgaaggtttcacagtgggccatggtcaagctggtcttaggaaggtcagtgtccacagtgcctgctggagtctaggggcaggagatgagatgtctcctggtctaggcacttcaggccttagctggaggagctgtagtgacttctgaaaggaggagatggttacaaaagagattaaaaatccaagtgacacccacacatggtctctaaaaaggctccaaagtggctcttccagcatagacccattctaaagttcagggatcccggacaggcatttttctaacttgaggttatgactgattaaaaaaaacccccaaaaaaccaaaaaaaacattgtgcctacttcctgagcaattagaagttaagagaagcttctgcccagcctctaaaatggcctggtggaactcactggtattcactttcctaaaccccggcattgttccttggaattcaaaataggttatgaatgtgcttgatgtcaggaaagataaatctgtgaggaggactgtagtcaatacatttcctttttaagtagaaacaatataaagagcttaattcagccctgaatcaatctcactttgttgccatgattgtgtaaaacctgaactgctttacgtctgtcttacaatgtttatattcccctgatgttccccgtctcagccggccgtgcagagtcccagcctttttaggccatgcacggctctctcttcttgaggctgttttcttgtgtgctgccaaagggctgtgcgacgagcagtgattttatttcatatctaggggttctcttcagggtggctattcagtggtgcccgcaaatgagcttccttgtctaagcaagttggaaggctaaattcttttgccttttcctttccattaaaagattattaaatgtaaaaatagtttgatacatacacatggtttggaaattaaggcactataaaaatgtatacattgaaaaatttcattcttacccctgctgggtcccctatactccctccctcaccccacctccattagctggaatgaactagtttgtccagagcagttccggtttaccttctttgttccagtgaatgatcaatcacaccctctttcattttcaaaagtgtcccagtttaggtgatgaattatatattatccaacagataggtagttacttttatcagtttcttgcgtatccttccaagatttctatatgcagatacatacatggggaatgtgtataatatatatatattgcttttgcctcttaacaatggatcctagaaaactcttatcagtacaaatggagtgtcttcattctgctaaactgtctttggagagtaatgtttgtagagactgatagttagttgcctttcccttggtttatcagtttaattgctgtttagggcctgcttctctttatctagagagagatggtaggctataggaagtgaaggcagattccttcacttaggaaaacccagttcagtagtaaacccatccaggatgcatttgtgaagcaccaactttatgcctccctaacatggtactaggcactttggatgaagtggtctcttcttcatctccacttgttcacatccttcaagttctagctcagatgccttagccctcatgaagctttccctgatttgctggccagaattcctgggcatctgtatccatctactcatccatccatctctccacccatcatccatccattcatttatccatttcatcaactagtgcttattgagtccctccttgtaccaggacttgtgctagatatgtgaggatgaacgagatgttgagtctcttgctacgggagacagacagatatggtgcagtgtggtagctgcaatgatagttatatgccgagggtgttggggaagcacagagtggagggtgcctgatcactgaacttgggagtgtagggaggtcttctgaagaggacacttcccctaatggtacttgcttttcactttctcctctgtgtttgccttatcctcactgttagactgagatgcttcgtgctttcttcagctctggccccctcccttgtcactgcaacccctagtgtagccttcttcatttaatagtcactcaaatacttattgaatggggaaaaaaagccaaaatgaattaaataggcctacccgaaggatcttaacatcaaaaagagcaggtgagatgttctttgctgcccttggccttcacggtttattcacacaactcatgtcctgaaagggcttctctaaattggtgctgatgcctccttccagtctccttttatccacaccacacagtctctgccccctgatcatcccttagcattgccatggtaggaaacccctatgactctgactagtgttgaaggagctgcatgggccgggcgcggtggctcgtgcttgtaatcccaggactttgggaggccgaggagggcggatcatgaggtcaggcatttgagaccggcttggccagcacagtgaaaccctgtctctgctaaaaacacaaaaattagctgggcatggtggcaggcaccggtaatcccagcgactcgggaggctgaggcaggagagtcgattgaacccgggaggtggaggttgcggtgagccgagatcacgccactgcactccagcctgggtgacagagctagactccatgtcaaaaaaaaaaaaaaaaaaaggaaaaagctgcatgattgggggccccaagtcccaccccctctctggtcttggtttactcttggaattaggggcatagctgtgaccccttaggatttctggatatttgacatttcaaaaacaatgatttctagacagcctggtggctcagccagctccttcttttatcttcttctaataaatccagcttcctttgccatttcctggtgccacagggggtgatctgtccaggataagagatagccaggccaggaaaatgaccttttaataaagttaaaatggccaccgggagagcgggacggccagtcatgtggccgtgagcctgtttgctgtgctgtgtgctgaggtccacaagaacagaggtccaggtagactccagctgtgcagctgtggaggcaaccagcagcagtgggttgtcctgggagagaattttggctgaatgttagcagacggtttcctaaaaccacgcagaagcagccttttaggggaagaggtgctatttgtttgacagctcatcactccccttttggttgtcctcatctgttctttctgcagtttttcacaagtgaaaaagtgggatggtgtttctctggtaagtccattttggactgtggcatagtgttgtctgtgtgcctggcattgcactggacatctctacattccattaaatcactggttcttaaacttggggagcgtaagaatcccctggggtgcttgttaaaaatgcatattactctctggtggacccaaaactcgtgatttttaatatattccctaggttatgcaggtcatacccagattttttcagctgcaagtcagaaaccctaagtcagattggctatgttttgcagtgggcaggcctatgcgaacctacccccaaagttcaaggatgctgacaggctgaagaaagaggctgatttatctagtttctcagaaagaaacattcaatagggacttatgaacagaaaccatgtctgtgtctcggatggtggtgagacaagatggtggatccctgcgctattacccccaagacccagggtttatatacggtaccatagggagggagtgacttacgaagggatgtgtaggacatttgaagcatgataatatcaaggttgttttcacctaagggcaggatttatgtacagtctcttagacaaagaagaaccgatacactggaaatcttagaggccttccatgaacagtggttaatcagaagtcaatgtgatggattaacattcaagatggagttgtctagcctgcacaggatgacaatagggaaattcattgtctttcaaacaggagtggtttcatgtggactgcaatgtgaatcatgccccctggagttgtgcaatggggccattcttaatccagacactgggcgggtttgggattgattgtttcagtggcttggtgatgtcaacaagaccccagcttcttctcatctctgtcatccttggcattatcttcatttgcaagctgggaatgagacagccacagcatttccaagcatctcagacacaacattcttggaaagaagggtataaatggattctggtgcttcttctcaggagtcaggaagcttttggaggcaccaccagctctcttctcatcatgccctcttggctggagttgggttacatgtcttccctgagtcaatcactgttgactgaaaggggatcccatttcctgagccatctggaggtggggtgggtacctgaacagagtggaggctctgtcaggaaggaaggagcaggaaccagaggccgggaaggttcccagcagggcctgaggtgcagggggtgtgcaggccacccttggagaaacccttccttccaccatcctggacagctgggggttgttggtgaggttatctgtgtcgtgcagatgaggaagtgaggctcagtgagggttagtggcttgtcttagataacaggccttgtaggttgtgggggttgggactgagggaacctggggcatttgagaggcctttttagccccaagagagtaaccatccccttttgccttcctaaggtgtccaagctgcccccttcatttctgatttctcctccatgactgcatttatttgtggcaggaggctttcctgagtatttcttatgggacgaaatctcagggcatgagaaaaatacatatactgtgttttcccctccaagttgactttgcctgaaagtaattgaaataatatcagttcctattcggggagagagttaaaataataaaacgtaacttaagaggtcgttgttaggatttaaggtcacacaatgcacatgttggcccctgtgcatgttatcttaaatcctaacaacaatcccttaagttaggttttattatttatattgtgtggtggggaaactgagacctgggaaggtgaagttgactgtggtggattgcacagctcgtcttcgggggtggacccgggacgggggctgcctcgttgaaagtccgtgctgcttctccatgccacgctgtggcttatcagcagccaccagccttgttttgcccctgaaggcaggttctcagggaaagaggttttagtgtcaaaagagttccaaatgagctgaatgtttcctatgggaataattctcagagcattaggaaaaaatatcctgaccataataaacacaagaaagaatcaggaaatctggtttgttatatagcagctaaaatgcaaatagggaaatctctcaaaaaggtttcaagggctgttggctttgaaaatggaaggccccagttaagacggtgagaaaaccgtactgggtccaggagacgactgatacatgtggccactgtggcagcaatgagtggaaagtctgcacaccttgctgtgagccccagttctgctgcttttgagctgtgtgacctccggcaagtcgcttagccttttagggcagtttctgcacatgtgaaatggggctctggctcgcagtttggtgggcagagggagcctggccagctgcacaaggccttgcaaaggtgaaggagtagcaggtgtaaaccacagagttggcacctctgagttggaagtttagtgctgctctacctggctgcgagctggtagttgcctagagtgcggggatgtggcagagcatggcagagcaggctgagggcaaaagtctggctttgacttctcaaagagaaaccgtctttgcctgaaaagcccctctctagctgtggatgtttggagaacctcccttggtgctttgcctggcctgtgcaccagggagtattgtatggggaccgatgtcctccacagatgccccagggcaggtaacatgtacagggtgggcagagataagtgctcggttctcagtacagacctgtgggaaggtctgagactcgggaagctctggctaagctgggaggagggagttgaaggaatgtgttgagggtggaccacaggtgtgttggggtattcacaggggaggacctttccaagtgctgccaatacaactctctgatcatggtggctctggagagaaggtgacttgacttttcagatttgagcagaggaaatactaaagtatttctttaccccagcagagcacatctacaactttgtagggttttgagtctgtagtgagatattttagattagtttctccctttcattcttcctgcctccctccgtttattgaacaccttctaaacatttgttgagcaacttctgcatggcaagctgagctaggggctgaggtttcaaagacaaaatcattgctctcaaggagttgtctcataggtaaacaagatgattacaaagctgtgtgataagtactaacaggtaagtacagggtcctctgggagaggtaggaaggaacacctggttgtgtctggtgggaggaggtgacacctgagctggagctgggatgaagggaaatgcagcaggtgaaccagcgtcttggaaggcattctatgcagagggtggtaacagcgttcattcttggaataaaagagttcatgaagactttctatgtgacagtggtgatgcagagatggatgggacccagtccctgccctgcaggtgttcacagtcaggtgaataggaagtggcagtgcaggtgacagtgtttggggtgtagacagagttctgtggcaagaaacacaggggccctgctgaatccagttattgctattcgcttatcagtcttccttccaggggacctcttttgcaggttctttcattgggaagaggctctgtttaaggacctagcttgctgtctgctgccctaggggctgaccatgctcttcagcaatttgggttataatgtgaggcatctattcttatttctagctttcttccttgtggagccattattggacttaggaagttggacttgggcaagtcactgcactactttgggcttcatttttcttacttacaaaaatagcccattggaccaggtcagcgtttcctcaagagttgtctagggaccacctacctttgaaaggcatggggtgcttactgaaatatggagtccttatggggcagtgccttttttgcgttcatacagttaacctttttaggggctgggcctggggttctgcatttatcaagcactccaggtgattcttaaacatcttagagttttgggacctctgggctacaagatttcaacctgcaatcttttcctccctaatctcctcagctgtatgtctacaggaactggacaataaaatgttagctttttgaatgttttatcgttgcagtgatgccctcggcaaactgcttggtagtttaagtgtccagaatcttgacagtgtatgcttatgaactgtttctgcaggctgtttttgatattccttaaggaagaaaagccttgttaacaggcacctgaatgtggctgtcagaatctgtttaagagctgaatcatgacagcaaacactcatctcagcctttcatctctggctttggagtatatgactggcttcccttttctgagtcattctctcttggcctcctacattctgaagaggtcatttgcattgtctaacatgggagccaaaggtttcaacttctctgacaaatggaatctccgctttggttccaaactgaccgtctttgtagggtcctccagggagttctcagtgttttaatagctgctgtgtgggttctcatttgttggtactgtggaaacagttttttttttttttttttttttttttttttgagactgagtcttgctctgtcgtccaggctggagtgcagtggtgcgatcttggctcactgcaacctccacctcccgggttcaagcgattctcctgcctcagcctcctgaatagctgggattacaggcatgtgccaccatgcccagctaatttttgtatttttagtagaaatggggtttcaccatgttgtccaggctggtctggaactcctgacctcaggtgatccactcacctcggcctcccaaagtgctgggattagaggcgtgagccactgcgcccagccagaaacagtttttaatatacaaagtaagtaaataaagagtcttaggctttatatggctgcctgggagtcttccccagtttcttatcctttccccttggaaatctagtgcctctaagacttcacagtgttggtgatgttgagaagctgttgcctaagaaccattctcaggatgacccctttatatcattcaggtgtgagtgaaatggattttggacaagggctgggccaggcacagcactgtgttctgacccgttacgaagaggtaaaccttgacaactggtatcctagaccttaaaaattaaaaattttcatctgggtcttggttcactcctcattctattattctgtgttttggttttccttgatgaaatcaatctgtaaacacagctctgcactagtaaattttaatgaagccctcgacattacccaggtgggggaaattcagagctatctttaaacaatgtggtagttgcaggtacacacccaagaaggcagagaagggcatgagccttctctgtattctccaagggtcttgcatagtgttctgcccacagtgggtgcccagaaagtggctgttagaagaatggacttttaaaaaataatagactgataattaaactggcaaaggtatggaattcaaagggtggctcagtgtggttttggatttgcccttggttcttcctcaagtttaattttcatggagatatcaattagatgcaggattagttgcaatgcagaatggcagagaggggaaaaggcagacgtcgtatgcattttaagttcttgggtacatctgttagttgtttattatttgccagtcactttgttagacaatcccaagaggttgacaaaccacttccttttgtgtccagggaaattgaggctgagaagtgcaacaattggtgtaaacttatgtagtgaagctattggcaggcttgctgaccagtagtcaagaaggattcatagagtgccgcctctctactggatcacacaggagttaaatttagctttgtgaaaaatattagaggtgatggagatcaactatacattgtcttggggtgtatagttgctttgtgacatttctgttacatggctatttggcctctgcttgcatctttccaaggacagggagctcactacttattgagtcagttcattttattttttgaattattttaattgttaaaattcttaattaattaatcatttttgagacagagtctcaccccgttgctcaggctggggtgcagtggcgtgatctcggctcactgcaacctccgcttcctgggttcaagtgattctcctgcctcagcctcccgagtagctggtattacaggcacctgccaccatgcctggctaatttttgtatttttttagtaaggacgaggtttccccatgttagccaggctggtctcgaactcctgagctcaaatgatctgcccaccttggcatcccagagtgctgggattacaggcatgagcccctgtgtccggctaattgttaaaattctttcatatgagctgaaatcatcctgtaatacagttttctcatttagaacccatgtcacactagtttttacaccccatgattcatttcgtcattcaaacgtatgtattgagcaccgactgttttaggttcaggaggaatacgagtaaacaagatagataaggtttttgccctcttggaatttagagcctggtgttagtacagtggaaagaagattgaactatatgtcagaaaacctaagtataagccaaagaattttacagaaagaaagaaaagaagaagtgaagattatataacacttataaacttggctaagacacttgagtatcagttttcacttcatttaacagaggacattatcccattggaccttccagaacagtgaaggctcgctggaataatgtaccttgaaaaatgttaattgctatgtattaccaagaggagtagtagtagctcttgcttctgtagagtagttcttaaagcatggttcttggaccaccagcatcagtatcacctggaaacttgtgcaaattctccagccccaccccagacctgctgattcagaaactcacagggtgggggccccaaaatcttttttacaagtaatccaggtgaattcgatgcctttcctagttggagaactactgctgtgggttagagcaataattctcagccttgcctgcacattggatgcgcctgagagaggggggcgctttcaaaactatatctgttccccccaactcccctcaaaagttagatcaggatctgtggtggggcctgtgcagaggctgcccaggtgatctgcaggtgcgccaggtctgagaatgctgctgtggccacagggcccagcccggagggacaggggattaagataaggtgcggcagccttggagttacctgggttggtttgagtctgagctctgccccttcctggctctgtggcctttggcaagaggactctggcctgagtttccttatctgcgtagtaaggataaaaatgcccatctctcagggttgttgtgacagtcgatgagatgatgtatgcaagcctgcaagcatgtgtcaggcacagggttggtgaaggaggactgaacttattgatggtagctgtgggtatctgagggtgatggtgctcatctttccctgcagccctctttgctccatattaagcctctttagttcttccatccgggacataaattccagcccccctttttagaaaactccattttgtccgtttctctctttaaaaggtggtatccaattagacaatatctatcaaaattacaaagatacccactttatcctataattccactttgtggaatctgtcctacagatatacctgcatatgtgaaaaaagatgtatgtccatttctgacagcattgtttgtggtagcgaaagactggaaaacctaaatgtccatcagtatagtgtcttcatgcaatcaaagactgtgcagccacagaaagaaatgaggcagctttttaagtactgacatgggactctgtagcatatattttttatgtgaaaaaataatgttaagctgtatggtatgctatcatttgtgcaaaaacaggacaggacatttgcttgtatgtgcatatactacacctggaagggtacaaaagcaatgggtaatgttggttgcttttgacttgggggtggaatagggacttttcactataaaccattgggtgtcttttaaaccatgtgactggaatctattaaaaacaatacattaaaagaagtgtggtgccctgagctgaatcctccacttgtggcctgaccacagcagggtacagtgtgagtattaccattttttctgtgaaccagatgctgtcctacttttaatgcctttgaagattgtattactctgggcactgtgggctctgatgaaccttgtggtcaggatggcacccttctctgtttcccatgaatggttgccagggcaggtctcgtggacttcaggaagtttagacctgcccccagcccgtacttttgcacaatcggctttgtttttcgcccagaatgctgggctgttaaggtcatttgaatcttgattctggcatctatagcattagctcttcttcccagttttgtgccatctgaaggtttgataagcctgcccttcatgtctgtctctagtcaagtcattgttaaaaagacagtggacagtgtgtgcctaagaattgaaccctgcgtcattccaccagtaacccttctctagcttgtcatcaagtcattagtgatgccaatgtatacatttactcaccagatgtttattatgtgcccattatgtgccaggcactatgccagtgccgaaggtataaaggagtaagacaactgtcctgcctggaaagagatcatcagcttgaaaagagatcatgattggcacactttttctctaaaggcctagatggtaaatattgtcagctttgcgggccatacattctctgttgtaactattcaactctgccattgtggcaccaaagtagccatagacaagatggagacaagtggcgtggctgttcctataaaactgcaaaaacaggtgacgggctgggttaggcctgtgggtgtgtttgctgacacctggtctagtagaaagacaagtaactcaatcaagtttaataagtgctctgagagcatatgcacagagcacaatggcggcccaaaggagggagtgatgtacggtcagtggggtagtaaccacctggctacatagacagtggtgcaagcagcttcactctgtttcactgtcttatctacaagtggatcataggaggtttttctagatgctttgctgaaatctaggtgcatgatatctttggcatctcacctgatctaccaacttggtaaccacaagagaaaaatcgattggttttggcatgcctttgtcattgtggacgcacattgccttttcccaacattcacatttttttcgaaatgttcccaaaccatttgttctataattttgccgggaaccattattggtctgtagtcgtccaggcttatttatttgtagatatcaggatcacccactttcctgctttaaaattgagacattggcccatgtctcctactcttagaccccgaactttgtgtgattttgaagttgatcaatagcagttctaagaaacttttataatcagttaaatatgcacgaaagaaattatatgttgtcaaaagaaaagttggagccacatcaaaaagtggaaatcagccatggtcttgctgctccagtgttatccctgctaacattttggtgttgcttttgccaaatacatgagaaataatcaaagctcacaatcatatcgctctggaaggggtatggcttatagggggagcctgatgtgtaagctacttaaccttttagaggggcacaattcatgtgtgtttaagggatggtgaaggcatagaggagaagggtttgtttcacctgaacaagtggatgtctgggaaaggcacaatagaacaggtgacccttgataatcaagtagaagtagttgaaataaaacagaattgcatatgggctacggttacaaccatgtgctaaatgtattttttaaaaactgcagggaactgtcctaaaataatactgtggttggaatgttgatgaatgtggttttattttctctgggtttccaaatgggagtctattgcctcttataattatttttcttaatgcaacacatgcatgtccctgtcctcaggaactcagggctgcagagcttggctgcagtctgctgcagggtcagggagcttagagccgtgttccatgcaccgttgtctttttcattagtggtagctgaggatgaagtagagaatctaataattctctgatagcctagccctgggagtagtctagtcttgggcgtggaacctgaaagttttagacaaatcttggaatataactcgaatacagtagtgcagattgcttctttgaaacccagtctgaataggtgagaccttgcttttccttgctgaagtattttacttagcaaagaattacttgcttttaaactgttcaagtgcaaaagcatgaggtaatggtttgagaggtaagtgacattatttagggcatagagaaaatgtttacacgtttatttctgacacacagatttcccatccccagcattcgttcccacctgccttatccacaggcagaagagagggcacccagaactgaggagggtctccagacattctgaagtcctgtctcactcctgtccacctctggggaaaggagaagtgtagttgttggattgcctagggtccagattttagtgctgcttcttaacttgctgtgtgactgtgggcaaagtcttggagctcagcttttcttctccaataaattgggatgataaaattggcctcagttgtaaggattgattgaaccagataatgtatgtaagcaccagcttaatgcctgacctataaacaggtacccaatacagcatggctgcttttactcattattactgttcgattgttagtgccagccttggaaatcggctcttgtgtgtcccctaagtggccatgcagaaagaactcttgccaagcattcattatcagtattttgcacccatatgaatgatctgcctcatggttctgaatattgacatgaagttggtgggcactagtgggatttgtggtccagcaacccaaaataatgttcagtgacatttctcttcagggattatttttcacaaaaggctttctataagattgctgaagggttgtgttcataaaatgtcaggtgctatgtgtgtgacggcattatgttgatgaaggcagtgttaaactgggaaacatgcatatgttaagtagggactcaagaaataagtatgggttgaatagaagaacaaaaggggaataatcagcaacaaggagaaggaaagggagaaaaggaggcacctttcggttgggccttgggaccctgtcagaacttctgcacccttcctgtctctctttaacctatagaaccacactggcacctggctctgagctttatgaggcctggaaaacttgtgttcttgaagttagtgatgtgtcttcatcctttttccagacacccccattttcacttttctaccactctgagattctactaagttccagattcagtcttattggtgaccagaaacaagataaaattagagaaggaagtccgggtgtggtggcttacacctgtaatcctagcacttcgggaggccgaggcaaggggatcacttgagctcagcaattcaggaccagcctgggcaatgcatattgaaaccctgtctctgcaaaacatacaaaaattagctgggcatggtggcgggtgcctgtagtcccagctactcaggaggctgaggcaggaggatggcttgagccccagaggttgagctgcagtgagctgtgatcacgccactgcactccaacctgggtgacagagagtgagaccctgtctcacagaagaaaaaaaaattatgggaggaagctctgtcctcaatcaggaaggcctgaagggtgggaagataggcttataagttaagagagaatgccaagcatggtggctcacgcctgtcatcccagctactcgggaggctgaggcaggagaatcccttgaaccctggaggcagaggttgcagtgagccaagatcgcaccactgcactccagcctgggtgacagagcaagactccattaaaaaaaaaatgctaagagagaaaggaagatgaaagagttacttttgtcagcctcttaagatgaaaaaggatgacttagggctgacatgctcctcggttgcactgagctccaagctctctgtgtgccgttcacctctgcctgctggtaaatatcagctgtatctgaaggtgtggtatggcattcagtccctcttcattcttaacctatcatggccattggcgactgggaagacaaagggtcaggcaaagggggtaccttattagcactgaggtctggcatatagtaggtatttaataaacactcgtctgtctattttctggttcagaatccatctgtggtaattactttgaattcagggcatggatagaactggaaccattctttgtgtgtgtgttgcttttaaaatatatttgagcagtaggacagatggtattgagagtactgaagttaatatataaaaaaacactttaaacatctttttgtagaaatgtccattttagcaaatttcacagagagtaaaagtctgttggtttcagtttaactgccaactaccctttcccctaatttggaaaaccatagctagatctaatagattagattctcagtctttctgcattctcttaggcccccaggcatttatggccagattgtgggagcatgttgtgccctttgagtatgaatgcataacgcttcctttatttttaaataccttaaaattttaatttcataaagctgcattttactatttaatttgaaggggtttgctgaagtatatttaggcatttataagcttttcttttggagatggagtcttgctctgtcgcccaggctggagtgcagtggcgagatctcggcttactgcaacctctgccttccggttcaagcgattctcctgcctctgcctcccaagtagctagtagctgggactacaggcgtgcgccaccatgcccggctaatttttgtatttttagtagggatggggtttcaccatgttagccaggctggtctcaaactcctgacctcaggcaatccgcccacctcagcctcccaaagtgctgggattataggcctgagccaccatgcctggcctagaagctttttttttttttttttttttttttttgagatggagtttcgttcttgttgcccaggctggagtgcaatggtgtgatccgggctcactgcaacctccacctcccgggttcaagcgattttcctgcctcagcctcccgagtagctgggattacaggcatgcaccaccatgcctggctaattttgtatgtagagatggggtttctccattttggtcaggctggtctcgaactcctgacctcaggggatcaacctgcctcggccttgcaaaatgctgggattacaggtgtgagccaccgtgcccagcctagaagctttttataagaagctggaaatgtcttcaaattctgtgtctggtatttatggtggtccacttaatatttgtcagtttgcttttctgattttgcaggagattgggtgctgacttagtacaattattttgtcaggttttgttgtgtttttggtgtttgatggttagagtggaattgcagaactcccttttgaaaggccttggtaagtagggggagaggagagcaggaccaaggctatgaggcagcttcaggttgggatgacttagcatggggctttctctttacactgttcccctttctgtatttttccttctccccctctttctttccctcatttctccccactttcctgctcctgaaatatttcatatacattgctggatttagtgcatctaggattatggtaaaaaagagggattttccttccttcctccactcctccccttctgctcttgcttaaaattcaggttttattttgacgaacattttacaaagtatctttggccatttcctccataccctgccatacatgtaaaagtcagtatgggttttgcagattatagagctcaggagtcatataaaaatggatgtcagttcttttgtgactcctattttggttctggggtgtctgtgctcactcttagtggggacaagcaggaggtggtaacattcacaggtgctggtggcagcactggtctgtgtgctggaggggaccagcaggaggtggtgacatccacaggtgctggtggcaacacaggcctgtgtgctgctgaagcctggccagcaccaggcgccttggctccagctctgcccgttgctgattgcatttggctgttgggttttttggctttctgatgtgtcgtttgtatcggccatttagcctattctgtttcacagccttttcatcctaggaatcacacaacttgagcatttttgaccttgtaaggctttgtagaagagactgtaaattccagatcactctgtacagcagtgcaggggttgaagtgagggaagatctgttacttggacggatggccttggcctctgaaggcagtccctgcagttggtcttgggtgtatgttgaacacatcccagagggaggtggggctgcacagaagactgctgatgggtgtgagcccatggaagacttggagactgacacctgcttcttttgcagcatatggtattttttcagttctctgcaggagggagggaggtttagatatttaaatgtatggtaaacagtctcctttcccttattacttatctttgattcattccaagccagtttcagggggcctagtagaaaagtaagtgtcctctgtcattccttccctccctaccagaaagctcaaagtttccggctaacctccggtttgggtgagagattgctgagaggcagtgtggctgggtcctaggtaaaggccaggcagatgtggtttcatgataggttctaactggcacgtgtttttgtgtgctcaacagcatcctatctcttctcttaatggccatctagttcattctttaacattagtggggaggaagcctccctggggcccagggaggtgaaatgacttactctgggtcacatagtagtagaagattccacactagaattgtatctcttttctgttttatatcatgttgcattgagtctccaaggtctgtacatacttcacagactcttagagaaacttatacctaatatggtgatggatagctgaatatggctaagagcacacactttgcgatctgatttgggttctattaatagttctggctctgctacttattcactatgtgatcatgagtatgttcctggtctccctgagtctcagtttcttcatctgtagaaaggggaccataactacctcattaggttttgaggatcacccaggactattgcttggtacatgtagacactcagtacattgcagctggcagcattattttccataccttgctgtagagctccaaggtatagtgaggctgccagctgtggtgaggctggcatccctccactttgagactgaggtagggagaactgcagcacatctcagacctgcctggattcctgtgccattttgcttcattcagcacatgccctttgagcagcctggggcatgtgcacccattggaagaggatgcctttgggtttaataacttgtgcgtttaataatcagcctttttggctgagtgatatggcagcagcagattgattttattggggcagaaaaagagttgtgtgcttttccgggtagccctgagtcacagaccgccaatttgttatctgcacatatgtgcagtcagctgtgcacaacgtcctcttccctgcccagctgctctggtgtgattcattctacaaatatttgagtacctactgtgttccaggcacaggacaaagtaccaggggaagatacattgatgagcagaaacagacctgagccctgacttcatgggctttgtgaggttgtggggaaaacaggcattaagcaaatgagggtaacattataatcagtgtaaggctatgaagagcaagtacatggggctactgaagcaggtactagagagatttgacctaagctggaagtccaaggaaggttcccaaagaagcggcaagtgagctgaaggaaggccaaaggtgtgaggagtgggtgagggccggacccgactcttgtgccatcccctgagcccaacacccttccttcttttccttggtcctttaggaggcagttaatcctcttgcagtcagtcttgttataatttcagatgtattttatttcttttcaattgcataggtttcagggcaaaaatagaatatggcctctactttaggagttcaacaacaatgcagccacttgttgaatatcaactgtgtgcattttcattgaatcctctcaaccctggaaggtcagtattaggattcccaggcgaagaaactgaggctcggagaaaggctaagtaacttgggcttttgtctcctgttggttactgattagaaagctgggattttaaccctatggcccattgccaaacactcttgtgtcctctgcctctccctctcagagacagctttgtggcttgacctggggatccaacaactatctccatgtcacgtccatgggaaaatgcaacctgagttccaaccctccaacttgaaaatgaacttttggcgcatggcctgtttgtcggttgagggctgttgtcttaattctgtgtcagagaggcattgaaaatccagaattaatggaagatggtcttggaaatagtcacttgaggtgagtgacaatggaccagatgaaaagaaagtcaatttcacccctgttgtggccagtatacctgtggagcgtggggaagagaaatgggtgtgggctggtaacttttaattatttagagttaagtctctaatttttgtgcgcttttttaatgagtgggctctgggtaggggtaatctatgctagttacttcatctatctgagcctcaatctcctctgtaaaatgggataatgcagcttatctacttcagcactgctgtgagattcaaatgaactacagagccttaggattagaagagggtatcaacatttgatatattatcaaatgtattaagataatacacttgaaagtgttttgtaggcctgtgtatatgatgctacttttgttgatctaccaccgtggttcatgttattattaatagcacaacacactggttcttaaacttgagctggatcagaatgacctggaaggcttgttaagacacagattgctgggtccctcccccagaatttctgattcagaagctctagggtggggccagaggatttttatttctaacaggttcccaggcaatgctgctgggctggtgaccacacctgaagaactacactacccagatctggagccaccaggcccagctggtgcctcagacctagacagtgacaggtaaaacccactgaccttggtggggggtgggtgtggatgtcaattcagggctatcgtgtggccagacagagctgagttggcattggcgaccctaggtcagggactgtgatgtctggagtagggtggaggcagctactctgctctcttgggtccctgaggacttaatatggccgctggcagtcaccatttctcggggctatggtttatggtgcagaaggtacctctctcatagggtgcgttaggccaaatttggatagacctatccacactggtgaactccttcattcttgaggctaactcagctccatccaagctcaagcacccttgggcttctgtaaagaaatcatcttctttctaatgattttccaagggtgcagtaaagggagcagccgcattaattctggggctgggtggctgatcctgtctcatatcctgtccctcatcctaagagatttcctacttcctgctccagccacactccttcctgccccccagcccgtgtgtgatttctgcttaaatctctttcttagttgagatagacaactttttaaaaaattaccccccatttcagaatagggcaggctggagcaggctagcagcaatttttgtatttttgggatcatattgagtgggatcattaaagtcaccccgagaaatggtgactgccagtggccatattaagtcctgagggacccaagggagcagagtagctgcctccaccctactccagacatcacagtccctgacctagggtcgccaatgccaactcagctctgtctggccacacgatagccctgaattgacatccacacccaccctccaccaaggtcagtgggttttacctgtcatattgagtggcttgctaaagatgcagattccctggctatcccctcaaaggttttaatttctcaggtctggagagatcgcagaaattctgatgcaggggtctgagaaacatacttagggagataatccaagagaattggacctgcttttcagtctgctgacaagtggataccactttactccagctacccagtgcccacgagcccctgcttggacatctgtcctctttagagtctgtgcctgaaagcctatgccccatatttgagagatgaagctgtagtgtgggaggggagtggggcttgcttaatggttgccttcttggttagccagcttcagagtttccattatggcctgtaaagaggtctttttacctgcagtgtcttccatcgatattctgcctcatatacactctacttctgcctcaaggcccagtatgaatctgaagtcgaagtgacttttgtagcccatacttggttcctgctcacaacttctctatgaatgatgatgggtcttctggtttttcttttgccttgtatggctgtctgattagcttccattgggctgattttatctctgaaattatattgtaagcatcatgaaggttgtggggtctgcatggtgttgggcatacagttatcgatgattatggataacttggttcaccgtgatgtttctggggtggagtgaccactgtttgatacctggtttgacagatatcaaaaccatggcaataagggtctagaattggcttgatctccacagtatctcttagatgcaaagatgttttaggtatagggctttgagtatcagtgccatcaaatagtacttccagggggaaccccagacaagtctgggtcctaagtgaaaccagaggttttagccagaaataaaccagcatcaggaagggagctggtcaaacactgttccactgcatcagtgggtggcagaggttgctggcaggacagagttagctggcatcagtcatggcagaagatgactcataaggctagttgaatgtgtgtgtatgagtttgtgtgtgtcagagacagagagaaaaaagattcttacttcaaacggcattcttcctgtgtctcccgaggatgtattttttcccctcagatgtttctttttttctacataatagtcaatgttcaagattgtgtaaaaaaaaaaaattaggaaataatccaagaacccaatattcaaaagggcctgggcagactgtcagcattttgtcaatggctctttctagcctgggttgcttgtgtggtagcatgccagatctatccaacaagattgccacttgctttgcctgttctttgctctcagtctaaataacttctcaattcattctagtccttttaaattttcatggcttgctgcatttcgttagctcacttaaaatgagaacatggaatcaatacagtacaaccacagacccaaagatggttagacttaaaagagtcctttctagatggtcccatgtggccaagggagatcttaagctccttggtgtaaaggtcctcagcccaggtgtcccatgtctggtgaatttaattttcttctttcagccctgcacctgccatccttgcaatcctgctttccctctgttcttccctcagccaaactgatgtgtggtctatagagagaaataggtttctcaggcctgaggtagctggaaccatttaagtacaaggaatccagtgtggaaaggggtgttgttcagattgcatttaaaaatgggttgggaataacactggctgtgaaaacattatcaaaaatctgcaaaatcaacactctttcttcctggtaaacatgaagggctcggcagctgcacctccctcacgtgtgtttggccaactgctgcttgggacattgtgcctccctcagcggctcatgggtgctgattggagccaggattggctctttgctggatcgaaaggtgtctcaatgctctgaaatgccataccagtcaagggtgcagttgaacttaacggtagcgtatacccgtccatctgggttacatgcgccccacatccctgttgaggtttcactgcgtcaagacccagggcaggcagaactgaccctcctgcttaggcaaaggtgacttatgggtgatttctttccatcagaatcctcaccctctcagtcaccgcataaccttatacaagagaatttgtttatttcggagaatcagcccacacacaggtttgaagcaagtccaaaaggaacatttgccactgtgtgaaacttgtctcatcttgctgctcttcgatgagaactggtccactacttcgccctgacccccgaagttgccaatatcatttgtggaaatcttactgtttggaaatttactggtttccccgaacaggagctatttgcctgagtttcttttagagaaagctgaactgcctttttggcactccttgtcttcctttttttttttttcccatgtatcttcataagtagatggcttggaaatagttaccaagaagaatacagctgtgtactccagtctaatttcctggagcgtgagccatgtcaaagggctcggattctgtttttgacatggactcagggatgtgctgcagatacagtagcaggtgggctgatttcaggggagcatctaaccggaaaagcatctaaccaggaacctgtggctgaaattggatgtgggggctggatgataaggctacaggtagatgcagtgttggctgaattattagatcagatttacatcctcgattcagaaagcttcttatggtacttagaattgtgcctggacctgcctggacctgtcctggtcttttttttttttttttttttttttgagacagtctcggttggttgcccaggctggagagcagtggtacaatgtcggctcactgcaacttccgcctcctgggttcaagcaattcttgggccttcagcctcccaagtagctgggactacatgtatgcgccaccatgcctggctaatttttgtacttttagtagagatggggttttgctctgttggccaggctggtctcgaactcctgatctcaagtaatctgcctgctttggcctcctaaagtgctgcgattacgagcgtgagccaccacgcctggctgtggtcatttttgatcagacgctggagctctggagggcagccctgtgaagtgggcagatctctcagagctgggagagagagcttacacttcaaagagtgatcagcacctaacagctcttttaacatgtgtctagcatctaggttacaaaaaaatcctgtatgtgtaggatgggggtgacctgatttttaaagaagcccttgtgaagaaagacccattttggatgaccagaaaaaggagaaggcccttcttagagggctggaggaagaggtggttctttagcagcatgctctgatagctttgggtttgtcttctggggcagttgactctcctgaatggggtgatgctgggctggtacctcaggagcagagtaagttggctctgacactagccctcttcctactagccgtctctcctctagaaaactaccctctccctgatgcaaggcctcttccatgtctatactggcttctccaggcaggagctagggcttttctcatttctgagagtttccaactcagtcccaaaggctgcaactgcctttgatgttgagaaacgacaacgacaaaaacaagcaagaaacaaggcagcaacataggctttaggagacagacgtatcaacaggctgggcgtggtgactcatgcctgtaattcctgcactttgggaagccaagatgggaggatcgattaaggccaggagttcgagaccagcttgggcaacatagtatgacccccatctctgcaaaaataaaagtagaattagctgggtgtagtggtgcatgcctgtagttggagttacttgggaggctgaggtgggagcatggagcatcccttgagcctggggtgttgaggctgcagcaaatcatgatcttaccgctgcacttcagcctgagcaacagcatgagatcctgttgctcaggaaaagaaaaagaaaagttataaacagaaggctttgtatttcagtttataacttaaaaataaggagcacttaattcgattctgcaaatgtggagtaataagaatgtgatcttagttccacattgcatcaggttacaggtggcacagaaaagatacaggtgtgagagcggaataaaacaggaagttggggtggagaggaaagctagtgacaagtagggttgtagggagaaggagaaagcaaagacaggcttgcatggaacgagataaatgtgcatgagcaggcttgtgagcagagttagaaaacagcacaatttgaggtggaaccagtttgtagtaaggatcttctcttaatgctgtaatttatgtccagaaattctgaaaaattacatcttcgctttcattttttttccactttaaaaatttttgacagagtctcactgtgttgtccaggctggtctcaaattcctaggctcaagtgatcctccccagtagctgagactataggtgtgagccaccatgcctggtaataccttcactttccaaaaacttttgacaacctgacatacctacctgtccttttagaatgaacgcttgatactgactgatggtactgtaagaagcaaagaccctatttatttaataatcttcaaaataaaatgctttttctcaggacttcaagaccagcctggccaacatggtgaaatcctgtctctactaaaaatacaaaaattagctgggcatggtggcaggtgcctgttatcccagctactttggaggctgaggcaggagaatcacttgaacctgggaggtggaggttgcagtgaactgagattgcaccactgcactctagcctgggagggagagtgagaatctgtctcaaaaaaaaaaaagctttttctcccccagacaaaaaccttattgtctttagatgagcccaaagagttaaagaaaattgtctgtattgatacacgaatatacatatatgcatacataaaaagagaaaaggaaatactttcatatcatccagcagtttttttctgggtggtaattttatgactattttttctttttttggtggggggaagggtgagttattttctatctttttaaaaacagtgaacagtattactttaatcagaaaaggagttattaagatatagtgctctggttgaaacatatggataaacaatatttaaatacagtattattatttacctaaagtgttatttactttttatagcttaagtttggaaatgcatgcatttagtgtatattagcccttcccctgctttcttctagcttttaaaatttgtaatttttaccagagttacacaggcatagagtttcaagaatccaatatttctacatgactgcagtctccgacaccgtcaccgttagccccctgctgccccggtggcagccactttaaaatcttagctgattcttttgatatttacttccacatttgatagtaacctgtatgttttactaccttttggacatcatctgttaacttatcaccatgtaagatgaagatttggttctcttttcctttcccttctcatccttgttttttttttttttttcttctttttttttgaggaagaaaaatcctgtcttctctgaaaatcttgggtgtcaggccttatccgagagggacaaggtttccttatttggaataatatgtgcattctttggccttttgtgattttgccaataagacttttaaagtctgctccaaaactctaagttattggcttgaactgggccatgtgttgctatgagctctgtagaccaaataaaaccaggggattgtcagaatctggattgaatttaaggcatctcctggaggttgttttttggaccaaattacagattaccaattattttatcctttgctttggtcataaaagtaagagtgtagagaaaatatacaaccctagttcattgtttgctggcctctggaaaacttggggcaagggggcggtcctagaaggtaccttccttgagctctcagtttcaggaaactctcaaaagacggcttctgttcatatttggtgatgtacagggtttgtgaggcagtgtgtgggggacccagctggatttgtataaagtcccaagaagtgctccttttccagaagggctgctacaatccaatctcaggaacgtggactgttatctgagttctgacagtttcactttgttcccagggccacccccagtcacctccaaattctttgtataattccagaggccattcctctgggcttatcctgcttcctccacgctggtgaataactcccacctcctgccctttgtctctctatttatggcccttctgagttctggagaagacttcactgggacttacgtcagtgagcttaacatctttctcattaatgaggaatgagagagaaggcaacaggacaatgcccccatggcttccactgtaagaaagttgaagactgtgaatcttaaagttattagagcagttggaagccacacggttttaacagttctacttgtgtacctctggcaatgaggaactcactctctaggagccactctttccattgttggatagctcttctcattggaaagctctttcccgctgatctgacattcgtgtctggaactttcatccatttcagaggataggagcattcttgacggtacagtttgtccaaccagtcaacacattactcttccttttgttctgacataagtggtataaaatgaggtaatagatgcattttgaaaaaagtaatggcactatacaaatgcaagaaatgttattgataggcttttatggcttagatgagtctgacttgaactttcagcatcatatactccattagtcgagaacattgcagtgaccttttttaggaagcagtttcctggagatttaatcagtgtagaaaaataccatattcagcctttattccacaaaagtgtcaaatatttacatgtctgaatagtctgggctgggtgtgccggctcacacctgtaatctcagcactttgggaggctgaggtatgaggattgcttgagcccaggagttcaagaccagcttgggcaaaatgttgagatcccatctctacaaaatactaaaaaaattagctgggcgtggtgttgcacccagaagtttgaggctgcagtgagctgtgatcatgccactgcactccagcctgggcgacagggtgtgactctgtctcaaaaaaaaaaaaaaaaaaaaaagtctgggccactactcttttggcttagatgccctttaatttcttcctttcgctttccttttttttttttttttttgatagagtctcgctctgtcacccaggctggagtgcagtggtatgatcttggctcattgcaacctctgcctccttgactcaagtgattcttctacctcagcctcccgagtagctgggattacaggcatgtgccaccacacctagctaatttttgtatttttagtagagatggggtttcgccatgttggccaggctgctcgaacttctgatctcaggtgatccgccctccttgacctcccaaagtgctgcaattacaggcgtgagccaccgtgcctggctgccctttaatttctatgtgtcccgttttgtttttcacatatctccctctatgtgatcatgtgtgtgtgtttagttttaaaattctgtttttttgagagaagaaagatattgagagctaactctgatacctttaaaaatgaaattctgaagttgaagattaaattacttatacattttattaattgatatcttccaggaggaaaatatcgtgttttgtgcaagggaagatcaggctctttttgatgaagggatagcagaatggttaagaacaggctttctgagtggtggcggctctgtaatcccagggcctacccatccctcacctctaagtgcctgtattccttcccaagtcctcacccacctgtgactagatatggttagggaggaggaccagttttgtaaataccagaacaagtatcttctaactgtatttgagtcttgataaagatgagtctaacacgcagctgttggcggggagcagtggctcacgcctgtaatcccagttctttgggaggctgaggtgggcagatcacctgaggtcaggagttcgagaccagcctggccaacatggtgaaaccccgtctctactaaaaatataaaaattagctgggcctggtggtgtgtgcctgtaatccgagctacttgggaggctgaggcaggagaatcgcttgaacccgggaggtggaggttgcagtgagccaagatcatgccattgcactccagcctgggcgacagagggagactccatctcaaaacaacaacaaaaaaaccatgcagctgttacacgttctcccacctgccctaggatttctcttaccttcgccctcaaacgctttctctttggaaaaatcacttgggtgcagtttgttgaaactggtcagcaaattattcttcccatagctctggcataagtctcattagaaatggttttatgaagcaaccgtaaaaggagctggttttctcagtatttaagaaaactcttgttttctaagtactgagtgtattgccagaggttcagttttgtttttcttactatgattttgatttatttgagtctgatagaatggtatcagtgacatgaggaataattacagcatcttttgaaattctatcctggaaccccaccaggaaccgacccagattggtgccaaggtacacataataggttttaggttttaaaaaatacttgttggaaatgctaggctttttgatacttaaagagcattgttttagtgggtggagttcttttttgatcctctaagtttaaacttcttagttcaggggtggccagtgaccatcctgtgttgtgagagtttaagaggcctctgagaggcaagacctgcatttgtatgtgtgtgtgtgtgtgtatgtgtgtgcacatgtgcacatacacactcacatttgtacttcttcattttgccaacaagttttaagcttttctggactttctgcttttactgaatcttcagagatgcttgctatcttaggaaatttagtgtgatattaagtctttaaataaagataaaaataatttgctttaaaccaagaaaaagagacagagagagagagagattggcagcaataaatcaacatgttaacattggtggacagattcttgtgttttctttgagacttcctttgttttctcagctttctatgattaacatgtattacttttatattagagaaaatgatttgtaaaaaagcatggttgctttggaattcattctcagtctgccgatgggataacaaggtagagaatacaggagggatgacagattggagcttagggacgtcaggagccagggctgccatgggaactgttgttcccagcctttttgtcatcagagacgccctcttttgtttttatacttatttatttttcttctaaataccccttgctctgaaaaatttcatcaaacccaacaccatgtttattaagtaataatatatttccccactcttgatcaattgaagatagacttaactgcctattagagttacccgagtcttaatggagttgatactgttccagctgagagtaaagatgtgtggtatttgaattgactcttatgttagacattcatctatgtcctccacattcatttctacctgagtggaattttctggctgtggacccaaggctgaggctctgcagttagagctcttctgtgttttggacccaggatccctgtattccttctgacactggaggcaagaaataggcatttctgtggctgggaaatgtctcctccaaccctttttggtcctaatctaaatgagaaaggagagagccaaatcccccaactccagcatccacgtatgggaataagcccactcccacggagtcccgcagaacgtgggaggaggagcttctggcaccgtttcccagccctgcattccagttttctggtcaccttttctgaacctcctgctgaggaactgtgaaaacaaagaatggtaaccatacaaggaagcaatccaactcaaacataataaaaattaatttaaaatattagtggatctcttgttgaacaccaaagggagggaattaaattattaatgcctaggaaaataactttaaaatcctttctccttctctaccacttggtatcctgtacacgacggcagctgctcctctagaaactcccttttacttttcatctcctcactctccccagccctccaggagtagtggggcatagaaagcctcccatccctttcatctggacaggtaaggaagctagaggggacacttctcttcttagaggatgacctcagttccattccaaggatagggtgtagaacaagagttcttagtttttattggaacatggacccctttgagactctgatgaaagctttggacactttttccagaaaaattatatgataataactaacatttatgttgtagacattgtgctaagcacgtaggtgtattactcttgatgctcatcacaaccctgtgaggtgtaggcactgttatctctgttctgcagatgggaacactgagccactgagatgttaaaagatttgtccggggatacacgtataaaaagtggtggagtctttgcatatagttttagttggcactcaggttaagatcttcagctctagattatgagccaccaactgcaatcacttgaagacagatgtctgcacatgtaacagggtagcgggtggatactaacccccagggctggtgaccaacctgcttgtcagggtggtaaaggaagggaaaggctgctcttggctccccttttgcagagtcctcccccgtcctcttgcaccaattaggtgagtctgtgtgtgggtttctaagtgtctatgctttgcagtgatcccacacagttatctaattggcatttaatgtgagctgggaagacagacaatctgggcttctctcttggttttgctaccaccaaactgtgacttggggagtcattcagaccctgtgcgctcatctgcagaccagggagaatgaactctggacttcactaggattgggagggtcttgctacagtgagaggaagtcactgcccttaatttgtctttctgtggcccataagtgaatggcctgctatagtgtgcacgtctttctgttattaagattaggggtcccagaaactggcctgtgactgctgaccacacttgacacctgcagtttttggagttgcagtgaatgttttcttagagctccaatccgtgatcagtaataattaagattttgtaatagctgtactccctcttctgtctgcccttcttcccacccatttggccatgacccccatggcaggtatccttaaaatcacagagctgtgaaacggcagtgctggaaaggaacttgatcacctatggccagccatgccattgtgcagaaatggaaataggctcagagaggttcagaaacttgcccaaggccacacagctaatccatgggagtagaggctgggtcatattcatcatagtttctctgttttagtcctcactgcctcccaaacttcctcagtgcatggagagtgacagaacgaactatttgtacaagcagagctattttagaagttcttcatggtgctaggcccacagttcctcatattcaggtaattgttaacttctcccagcaccaagatgaatctctgctatagacagagacctgggaaatacccctctctatttactgcgttatcccaggtaatgtagagatggatatagccaggcagtgtgttgagaaacttttggaggtagggtggtgtggtttattaatggctgtgctggggttctgtctgcagcagaggtttaacttggatataaagagcatcttttctgaagctgggcccagctgatctgagtggtgacatttagcactactaggcattagcttccagcatccaccacctcttgccacatgccactgtgagtgttcatggactttctcctcttctctctgcaaaagagaattctattgtctattactcaactttcctagtaacactaccttctaaggagaagtttctcttggttagtttagtgcctgggcctttttcatatggagtcagggcaatgagtagaggctgaattagagaactaggaagtagggatggtcagagtgtttgtgtgtgtgtgtgtgtttgtgtgtgtatgtgtatgtgtgtaagcacctactggcatctgaaagggccaatacttgtaggtgagaagagagaatggaggccaaaggagaggaggagggagaggcaagaagtgtttatcagcacaggagatgaaaagtaaaaggaagtttccagaggagctgtctgtgtttaggatatcaagtggtagagaaggagaaaggattttgaagatactttcctgtgcattgggattttgaagatactttcctgtgcattaataatttaattccctccttttggtgctccacaagagatcccctaacattttaagttaatttttattatgtttgagttggattgcttgcttgtatggccaccaagtggacactgggctacatggagacccagtaatgttcaggcgacactggtctgttctatctggggcatagaacagaggatggtgaggcagtagaatgtgagaagcacactctggaaggtgagtgatgggggaaatgctctgtggcagggggcctggggctgatctgctggagtcagcatgtgcttggtgttacttcattctgcacaaatcccagatcattttcctgtgttaaaaataaagaaatatgtcagagttctcagattcagtgcttatttacttcataccctatcttcaaaaataatttgaggcagtttgaatttagtggggaaatgtggcaattcattcagactgtattttttccataaatagaaaggaaatttgcgttgagaaggaagaagaggttgagtttctaggccacattttactgacagaaatattattggggaaggatattttaatttttgttctccaagaaattgctcttttgtactgctttgaggtggaggtggtttagcacagagaggatttttaaaccaagggaaggagcagtgactgtttggcttagataaagagagtgctttcttctgtctgtgcctcctggagtcgaatcgatctgtgtgagctgcctgtccaacattcacgttcagtgagatgacttctttgagtggctaaaggccccagaacaaacagcctgctgggacttgcaggtctgtgcatggagcttcttcctgtcggctcctagaagggcagagcaatgcttctgcggaagagtaacatccagaagactgacactcagaatgttcaggcaagagtaccagtcaaaggcagaaaaaaagacccgcctggtactgctggtaagtaaataagcatcgcagtcttatttacttattatttgtttatttttttagagacagggtcatgcaatactgcccaggctggagtgcagtggctgttcacaggtgcgatcatagcacattgcagccttgaactcttggcctcaagccattctcctgcctcagcctcccgaggagctgggactacagacccacaccaccatgcctggcttcagcaaggtctttttagcccagtggccaagctgttggttaccttgaaattgtccatattttttgactaccttaaggggccttgtgtgagggcagaaaatatcagctgccttctgatgtttgaagcagtgcccagggcagatggtgattccctgcctaggtttgaaagatctcaggaaagcagccatttgctgggaaaaggcctgtgaccagttcctggtgtctcaacaggtgggtcacacctgccttgttgaggctggtctttctgactggctggggaggtccccagggagtcttgccgatattggtcacaatttctcagctgtgtcagtgtttctcaaagtgacttctagaccccaggcatcaggatgttctgagatgcttgtgggaaatgtgtatacctggacccataccaggtggacagagtctgaatctctgggagatttgggcttcccaggtgattccttttaccctgtagatggagaaccactgtcctacttgctgccactgtgcagaactggacgttgtggttagtaaatttgaagccagatgatctagactcaaattttgtgtccttaaggaaggcggggaaggaagaagggccggcagtgtgcaggtgttgagtaccagctgggagaagatgcgtggttagtgcttccagctctcttcttttatgtgcgctcagcagcagcccagggtgtggatgttatgcctgtgtacaggggaggaaactgaacatcagagattgagaactcgtttaacatcatagagttggcaggtggaaaccagcatggccagccttcttgcgtttttagttatgactgtaatccccactctagaatgatgagtgtctccttgagtctggctgtgcagtagaaatatgatatgagctacaaaggtaatttaagactttctagtagccacgttaaaaaagtagaaacagacaaaattaattttaacaacactttttttctaacccagtatatccaaaatattatcatttccatatgtaattgcataaaaaaactctcagatattttacattcttttttaaaattctgagtcttcaaaatccaatgtgtacatgactcttacagcacatctcaagtcacactaaccatatttcaagggctcagttgccacctgtggctagtggctggagacgtatgtcctaccctgctgtccaggtagccaggggtcagagttttctagatcactgatttccaggcaccccaggatggattcatgctgggcagactgcatgggtgtcacctgaggagaggatattaaaattcctccatcaggctggagccccaggtgatctttttgtgtaacctggttggaaatggctatgctaaaaacattcactggcaatttacttgggttgtctgtgactatgcccgcccccttttcagggacagttgcattccaagcacgttctccgggagtgggtggggtggtggggtggtaagaaaggtgggggaacgcacaccctaagggtcttttccctgccttactaaatagaactatagtttcagtggagaaaagaaatcccgcttatttttctggttgtgatcttgcataaggggtggaacctttccttttgatggctgagagcgggatcctgtgttctcaggaaaggtgagatgaaagaaccaacatacttaggggagaatgagatgttgtgtacttaagctgtgttcttttccagtggtttgattttaaagtttatttgctgacatagtaagaaatttggtccaaaagagagtctgggagtctaaacctcaaatgcttcagaggtcaggcaggtagcacgagatgaagggtaagagattgaagaccaaactgttaggaatgttctccgcactcacaaaaatgttgtggtcttccttttttctggaaacataagactcttgacctttcattttcctgtttttgatagataaatatttatcttttgtaagagaaaaaccagtgcatgcaactgggatcaatggcagccaacactcagctttggcgttagggagatgaatcggagagccttggccatttacagggcagcagctactacccggctccatccagttgttatccttgaggccctgtgttgccagatcctgttatttttaaagagaagccacattttgaaattataaaatgtttggctttataaatgttattgtaatttaaaaatcattacaaggccgggcatggtggctcgtgcctgtaatcccagcactttgggggctgaagctggcagatcgcttgaggtcagaagttcgagaccagcctagccaacatggtgaaaatgtatctctactaaaaatacaaaaattggctgggcgtggtggtggacgcctgtaatcccagctaggggaggccgaggcaggagaatcacttgaacccaggaggtggaggttgcagtgagccaagattatggcactgtgctctagcctgggcgacagagccagactccgtctaaaaaaaaaaaaaaaaaaaaaaaaaaaaaacattatagactcacaggaagtggcaacaaatggtacagagggatcctgtgtgcccttcaccccacttccccagtgttaatattttatgtaggtatagtatgacatcaaaaccaggaaattgacaatgctacagtcttattcagatatcatttgtgttatatgtactcatttgtgtgtgtgcacatgtgtatgtagtcctgtgcagatttgtataatgaccaccataatcaagaaaacctttgaggctgggcgctatggctcatgcctgtaatctcagcactttgggaggctgaggcaggaggatcgcttgagcctaggagcttgaaaccagcctgggcaacataatgagacctcatcgctataaaaaaaaataattaaaaagaaaatctttggcttttgaattgtttgtgcaaatataacattgaaaactttgtttaggtctaaagaacatgccataggcctggtgtggcccgttgacctccaattttcaacctctgttctagtctagccctttctttctttcttttattcagataaatttcacatgacacaaaattcattgttttaaccatttaagtagacagtttttttaagtatattcacaaaggtttgcaaccatcactactaattccagaacatttttgtcaccccaaaaagaagctccatttagcattttcaccccattcccctctacccccttttcctgacaacaaacaatctactttctgtctctatggatttatctattctggacatttcatgtaaatggaatcatacagtatgtgaccattcgtgtctgattgggccttttatcttacagaggaagaaacttagggccagagaaggaaggtaacatgcccataattatgctgctggcaactgccctagtctggacttgaacccagaaccagtactctttgtaccatacctttctgcctgttagcattcaggtcttcagttttatgatgatggtgataaaactaccaccccagctatttcttatcagttggcttaagtaagcatgcgtaataacagaatgtttctcttacttgtactgagtattaacattatgcaaagagtcactttggaaatgggaattgtcaccgagaaaacaaggtagtttagttcagtgtatgtttattgagtgcctactatgtgccaggctctgggccaacagggatgaattgaatgggtcccagccatcaaggggcagtcatttgggggaaacaaagagattaaagataatttccagatgttgagggcaaatatgactgtggggcagagggaaagggtatcagttctagcctgggggtggggtggtggtgatggtgagggatgatttaaggggtggaaggaagctaacaggtaacgaggcagcagaaagatgttttaagcagtagagacctgagcaaaggtttaggcatgatggatccagagagttgaaccgtgagctcattggtggtgatggagggcgaagtggggtattggagatatggttcgaggggtgggcttgggtcagattcttgagggtcttgacgtcataaaaagtcagacacggctatggatgtctgaatttttcaagctgaggatggctgaatggaggcagagtaagagaagccaaacatgggaactgggtttcctgggaaatacccaggtctgaacaattggggtggagtcaggggtatatggtggtggaaccagtatctaagtagcaacagacttgagaagaatcaaggcaagagaaaccaagagacccattctagaggccatgatgaagtcctgcccacgcttcatgccatgatgaagatgccatggggcatctttaaagggctctcagccctgttcccactggcctgcctcctcctccttgtttacccgcccacccactcagcaacgttttactgagtacttgctatgtgttgtgttgctgggggtaccgcagtaaacaagttgggcaagattcttaccccctaaagggaaatacagataaataagataattacagattgtgagagggtctacaaggaaagcagcttttgctggtgagagtaaggttagggagtctgggctggccccagtgaaaaagcatatttgatctgagctctcaaaagtgagtgctctctttccgtggtgagaaaaagggaaagagctttgcaggcagagagaacagcaaatgcaaagactggggaaggaccctctggcatgggttaccctgggctttgtcgagattttttcagggggtctcaaatcagatagagcaggtttctggagatctggccctacactgtcttagggaggggaggagagagaaccattagctttgggaggaagaatacatatcctagtggaggaaaaattgtgaagtcattgtgaatcattgaaagtaggcatgctttctttttttccttttttttgaagggagagctaaactcattttgttattttcaactaattttgttatactttatgagctttgtgtcattcagagaacttggaaacattcattctccctcctactgaatcagtggagtaggtggaagagctttaaaaagctcttgaggattcatcttcctttgccaatggatgcaggaggaggacagctgggcaatgggaacacagccaagaggtgtttgggaagtgggagcgacctcatcattgagcacccaggaagcttcagtggggttcaggtcctagagatgttggcaccagttatggccccagtgggttttgttatggaaaagagagaagtctttttcaaagtcagaaaagggattcattttgcatattagaacttcatcttaaataaaataatgcagtgtgatttaaaaaaacactgcccatggtggggcacggtggctcacgcttgtaatcccagcactttgggaggccgaggcaggcggatcacgaggtcaagagttcgagaccagcctggccaacatggtgaaaccccgtctctactaaaaatacaaaaattagccgggcatggtggtgcatgcttgtagtcccagctacttaggaggctgaggcaggaggatcgcttgaacctggaaggcggaggttgctctgagccaagatcatgccattgcactccagcctgggcgacagagtgagactctgtttcaaaaaaaacaaaaacaaaaaaacactgcccaaacatgaaatagataacttctgatttgtttccttcccaaactggtcagcctcagggccagttgggcattttctcccctggactgcctgtgtttgttgatggaagagttggaatttgtggagggagaaggagaagagagtatgtcgtgagctcggaaagcagcttgggccttggatctggaacaaggagagagggaccaagtctgagctgagtggcatgaaatttgaggtgtattttgaaggaaaccagagggctccaaggtactatattgggatacagtgagccatcaaacaaagaccccttaaaattttaaaacaacagcagtaacaaagcaaagcagaaatgattatatggatccctgtccatatataggttagtgggacaacaatgtgaaaatataagtgattcatgctaggaaggagagatacatggggctttgagaacttgtaacaggagagcccagagtggtccagagtgggtcgggtggcctggattgatgtttggtaggaatgagggtggcagaggtgactttcacaatggttggtattgatctgtattcttgggatgggggatgaattagggagtgatggtttgaggtctttggcagggcctgggacaactcttgtgaagtcttttggggggttgggacagagaaatgtcttgttttaggccagaatataacagtactgtagggaaaattagtgaatcttttaaaaattgaggaccaccaccgggtgcggtggctcatgcctgtaatcccagcacttggggaggccgaggcgggtggattacgagatcaggagattgagaccatcctggctaacatggtgaaaccccgtctctaccaaaaatataaaaaattggctgggcatggcgacaggcgcctgtagtcccagctactcaggaggctgaggcaggagaatggcgtgaacctgggaggtggagcttgcagtgagccgagatcatgccactgcactccagcctgggtgacagagcaagactccttctcaaaataaataaataaacaaataaataaataaataaataaataaataaaaataaaaattgaggaccaccaagagggggcaaattatgatcttgagcttttcctaaacttcctcctccaccatgctcttccaagtttgcattatggctcacatggaggatccttaggttgatggggacacctgcctgtttccttgttccttggaaggatagtatggattgctgctgggccttgcaatcagaaaggctgaccttagtcagctgtgggtttctctggtgctggctgcctgaaggtcacctagtggcaccttgtaatattgggggaagagatttctgcaggctggtgcattcagggagccggtttactccgatccgtctgtcatctttgcggtacacggcatttactttgccagtcttagcttgagattgctcaggtcgttacatgaccacaaagtggagatctggaaagagaggtgctcagccaggcttggcaggtttgcaggcgctgcattgaccggtagagtcctgcgctttggtgggcaggaaggacctgatcagagtgctctgtgccttggagctattcctcgaaggccacctgaatgactggatgctcccacatcctttcttctgccagagcagtgaacccacacaggtgtatgaaggctcagatctgctgctgagattggacacccccaatcgtttaccaagaggcactgacattgggccatggtatacaagggatgggggcaaagaggaaggccacttcacttacccatttgctattctggctgctggcattccttttttttttttttttttttttttttacatttatttaaaagaagttgtggttgtcatagtgtgatgcagagagtgggtaaacataccagggatgtgctactcccctaaagatctggatccttggctctttcctggaggatgctgaattcatgtccttgaagaggttttggagcttctgagacctctgggtgaaatacactcttttcatattggacatcgcaatcacctgtgaggaggttctggacagtgcttggacctctaaaccatagattttgatttaatggctgtggtacatagggggttattttgttgctgtagttctgcaggtgtttctaattttcagccatactcaggaacctgcccactagttactgattcagggaagctcttccgattcttcaggtgaattctgcctgtttgtttcctcatacgggccttgaaccggaaccctacccttgaccacgtgtttggtctttactcctctgtgtgctgctttccagcctgtgttttggagtgcttttccccggctttgcctcagcctagatcagggctggtgactcacttctttcttatctatgaagaaaaggagaactccatgtggggattttgatgggcagatattctggaacatttttcacaaggcttcctgcttgaggctcaaatgcatagtagcttcttgctgcggaaatccaggtcctggggtggagatagacagggcagccttgtgactggtatgagaaaaacatctttatttactgtcttttgtccatcatgaaaggcttagtatttctttatttcttttttcttttttttttttgagacggagtctcactctgtcgcccaggctggagtgcagcggcgtgatcttggctcactgcaaagtctgcttccctggttcaagcgattgtcctgcctcagcctcctgagtagctgggattacaggtgcgtgccaccatgcttagctaattttttatttttagtagagatggggtttcaccatgttggtcaggcgggtctcaaactcctgaactcatgatccacccatctcggcctcccaaagtgctgggattataggtgtgagccactgcgcctgaaggcttagtatttctaccactgtgtttcttaggccctgcagactctgggacagcagactccagggagtcgtaggtaggcattgccagggagcagggctgaattagtgacatttttgatatggacacttgtcaagataaacttctgtaagtgcatatgtaggtctgtggatcaagtccagcagatgttgggtcacgtggcatcaggcaggggcttttaagacccagagctaataggagatctggacaagaccaaattgtaggggctcttctcatctccttgcttttgcctccattgtcgtccatttctcactgtgcctggtccactcccatccaacctttaggatttcctgaggcctctgtccatgctaggaagtatcttttcacctccactgcatcaggtgcccctgctcagtgctcccataacacaggtgcatactcagatcactacacttaccgtagagggtttagctcaggggtagagcatttgactgcagatcactacaattacccattattttataattcattttgagtgtctggatctatcttttattcagatcaacttgagggtcttgttcacttttgtatctccatcaccttgcatacttcctggagtgtaatagggctcaataaatatttgttaagtgaatgaatcaataaattctttgtgggagtgatataaataagtactatcaagatcttattgttgaacattgcttacttattacagtgctgttaccttgtacataaacttatttacagtcttgtattgaagatgcatgttaggggagatttttctagcataaagagtactcaagaccgtttaggacactgagcacttttgatgtatggcaagcattttagtggaaagtggggtgcttcaactgtatttccttgactttaatacttctctgaaagtattatttttgataattatctttaattagttaattgtgtgtgtgtacttgtttattgtattaatttttttgcttaatagtataagactagtatgtagtccagcatagtgtacgagtcctggattaggcaatcgagagacctagattgacctctgcatctaactatgggagtgggcaagtcagtttcctgcttacatttaattcatgtaaagtgggagtgttgtacttctttgggggttgcaaatgtctacaggagtgaggctaccaacttgagttattatatgggctctaccattttttttttcttggaactaggccccttttgttttcccacttgtgttagaattataagtagaagaaaatatttctgtaccgcaagaaaaaaataatgcaagggcaatgactaatgacaaccccagttcttctctgtgtggaggagacaatagggagtggtggggactgtggtatattggagcggccaagcctgcctatgaagggtgactgcttttaatgcttagcaccacctgatcattttaagacataaatgtgggccatgttgacaggtctgatttttttttctttctttaagagaagccagaaatctgggtttttgtgtgatagctctgatttttatgtttggctcagattttctaaacatatccatagatgaaatgtaacacttccacaggttggatgtcaccccttgtgctttcagtttgtgatctccattaaagatgatctctaaagctgccttctgcccaagatcctgtgattctaatggggaccatttcagctggtgaattaaagatccttgttctactttgggaagtcagagtggggaaggaaatcgggctacaagagataggggtttatgcctaaattgcctggcaaatggtgtttaaatgagtcctgttggggagaggccacagggtgcctgtgattcacaccaggtgttttgtacatttgtcattgcaggagttggcatcctttggaagagttcgtgaaagctttctgcccagagctcctggaccaatgcatcttcccaccaccttaaaccactggtgaatatatgtgtttttttccttcttctcagtgaagggaaatgctttgttaactgtagaatgcgatttgcagagaactatgctgtcctttctattatagaaggaagtatactgggctgggcctaggcatatctgggttttggtacttacttgattctgccatttttactgtgggattgtaggtgaattctttgacctcccaggccccagacagagaaacatatcctgctgtttacaggatatgtttgctttgcagactaaaagagataatccatgcaagaagtaatgtatgcacgaatgcttatattttcccagggagaataaagtcctgggcaaatagaaggtaatactgtttggctctgagatgtagagcaaggcagttctccccctatctgctacatttattaactttattaacacactttttcaagttggaattccagatataagtgttacagtgtagctgccatagtcagcccaattcaactgaccaccagttaggggcttcctgccttgacttttgtgatgttcacagacaccttcatctgccagtctcataggggttttcaagcagggcacttctgagccaacagatacattaaagtgtgaaactgatatgttggaaataatgggttttaaatacttattttctgagactttcagagtggttcttcaagagatttccattctctcttttttttttcccttcctaccactatagctaccattttcttgaaagatgaattaacgacatttcacaattaccttcatttttatttgagatcagagaatttcacagttaacaaatgttcttcctttttttgaaagaaacttaattactcatcacagcaggtacatgtcttgcctctatgacagttgaaagaggcaaaaatatgtccttaataacagtgtgttccagtgctgaggtgagagtgcctccaggtatgacagctagtggatgttggaggtcttaggtgagatattgagggaaaggaccaccatgggccagggacgctgaacaacccatgcatctttatttgagctactctttgtagagaaaagctggcctgtttaacactacctggtcagctcctatgatgtggatcaggtgctcctgtgacctactgagacagatcccagtgggatggccactggtgagtttgcaggatgctgggggttggaataggaaggaagggcagtcagttaggtaagcaggcccaggattagggaaccagatcagccacaggaggctggctgtctagactcccctgtccaaggggacacagtgacattctgagtcccagaacctgaatcccatctggtaggcaggaagggctctgtagtggaagtcctcagggaagcagatggcatcaggtagcaggacacttatgtattcaacaaatatgtattaatgcctgctctgtgccaaggcactgttctggggattcagtggtcgtaagatagactgtgcctatgcctccctggatcttagatttgagtgggaatgatacataagaatgtgagctccatgaggacaggggtctttgcttgtcttgtcttgttcactgttgtatcctcagctcttagaagagcacctcacacctgatgggtgttcactaagtattgtgagcaatacttatgaaggaagcaaacaaataactaaatagacaatataatttcaggtggtaatgagtggtatgaaaacagtaaaacaaggtgaagggctggcggggctctttttgaaagaatggtctaaaaaggcttctatgtatgtgagagagaaaaagaaggagattggttttgtgcagagacctgagtggagtaaaggaaccaggggaggagaagtgttcaggcagagggaatagcaagtgaaaagaaaggcctttgacgtaggataagcttggcttagtagaggagcagtttggctggacttgggctggggggtgttcatagggagggagagtgatgtgaaataagagcagtaggtgagagccagaccctgtaggccatggtaaggagtttgatttttactctgagagtgattggattccatagtccatgtgatcttctttgtgctttaacatttttcctctggatcctgagtgcagaatagatgctaggggcaagagtagaatctgtataacctatcggaggtccttccagtggtccaggcaggagattagggtgtggcttggattagagtagtgatgattgaatgatacgaagaagcggtcaggctcaggatacattttgaaggtagagccttctaggttgcatgtggcatgtgagtaaaaacaagagtcaggattagtccaatgtttttggctaggtgaatgacgttgccgttcactgagataaggagcaaagagggaccctaagggttctgttgggccgtcttaggtttgagatgctcattcaatattctcataaagatgtagagttggctggggctggaaatggtatctctcatagtcattggcatgtagatgatatttaaagccatgagactgaatgagatcatctagggagagaaaggaagagatgcgtaggatttttgacagaggaaagagggaagacgaaggcaaagggtatattttccatataaagtccccactaagaagtaaataaagacatgctaatgaatatggtttccattttatgcaaatatgaattatacaaatgagataatatgatataaaagtagtcataaagtctcaccttatgtaaaaagtttgaagtgctgtgacttccccaaatcaagaaaattagtttcaagattgcataattataaatctggtcagctgagtgaattattagcaagcaggaacatccagcagcctttgccaatagcctgtaagctacattgctcttaggcactggaacttctacaagccatttcaatgactaaatttaatttactgttattacatttcaggtatttttctcattcaatagttatatcatccaaaagttcattgagggttcactaagtgaaaacatacctgaaaatcagtaattttgcaatgaaaagttagacatcataaaattttctgaagaaggccaaacaggcaccatgatttacagggctagaagttagaagatatttatgattatcttcaaaatatcaaggataaatgctacaagataacaaatatactgtgatggttgtggtagatagttgcattccacctgtacccctcaactgccattgactgatacgagaaaatcagttctgactcatgcacatcttcatctatttgtgggcttctggcataaaatgcagctgtcccatatttgctttgtctgtttcccagacaaatcgtctcattgagcttcttccatctcctcgttgggcgccttagttttcccattttgaggctcctagtgagttcctttagtcttgcagtctccagctgccatagacatttttgcctcttcccaccatcactggctccaaagcctatttgcctcctcctccgactgcctatgtgagccttcctccgtctgactgcctttgtgagcctttcagtttaggaaccccccaatccccctgccctcaaagcttttgaatatcctcacaatttccttctttgaaaacattttcactccttccctcaaccccaaccccatgtggtcttctcaggccttttgtggaaatgatgatgagagagggcagggtgatcagcagcattctagaatggggtctggccctcccgtgggcatgggcagtgctgacttgcttctacatgtatttcaagactccccagcttgagtgaaaacactctgagtggtacttctggaacatgtaatctctagaaaatgaacattaattgtgtagtgttctgtctatgaccaacggtttatggcaaatgagggtttcagtggaatggtatttataatgaatggcatcaaccctggttttcatttgttgtcttttctcacagagtggaacttaaataaaattaaaaagaatgaaacttactggcaatcatagggggaggatttttccttctgattcctccttcagtaagtgatttcaggaataaaaaaggtatgggatcttcctatgcccctggagacttagagtggtgggacattaaaaaactggtggtatccttcgtaagttaaacacacacacagacacacacacaaacaaaaaaaccgctgaggctgtagaatagtcttcagtgcttgtatatttgtagaccatctcaggaggagaggcctgagatgggtagctacttaaaatttttttgtgtgttatgtttatatattatatttaaaaaggataataatagtatcccttttattctttataaatgatctagaaacattgaaagtttcctcaccagttggtttataactcctcttgctcaatatgtcttttgattgagggcattgcctgttcacagtgcctttaattggtctgaggcttcacattcattaacggcttgggactagagtactttgacttgagtttcaaattttgcatgtatggggatatgtcaggccaatttctttcttccatcctttcccttatttctaaaaaggatttaaagctgtttgtgctcaatattttcttttttcagcagctttagacaaatatggatttgaaatgaggtggtcgccatgagttgagccacagattatggccatttcaactgaacatctcactgctgccctttagaacaaggtcttcttgcattgtggaacagaacaggatttggaatcctttgtgattgatagtttctaaccgcggagttcagacaaattaaaaagcaatccaaacccattttctttatcttaagaattccagctaccctaggaaaatgctcaaaatagaatttgtataagttgccacctctctgaaagagtagggtggcaactgaattctaattcggtgtccagaaccaatgatgccagtcaccacactgctgtttggagtgtgtgctattgggggcagcttctcaggggtcattgtctagaagtatctccctgggctgccatattgctttatatcaccagaggttcataaggccactttctggccaaagttattgtgacctacaatgacatgatatccatttcacacaacagcgacatctcttaggtgttggtgtttctccaagagatttacacatttgcatttgtactttttaaacaaacaggaagttgtagcacatttgccagccacatgtaaaaacaagatactttctctttttccatctagtgactacaaatagagagtggaatacattttttgtctttcctttttttttctttttttttgccctggtttggagaagtaaacattaaattgtgttggggtcgtcactaaaacaaggagatcagcatcatctccggtgattactgctcgtcatgggaagaaatcattctgattgttccactgactaatttagacaaggcaccatttgatgcctacttcacagcagtgccctcatcctgctgtctccttatcaacatagagatgactcactccatgtttttctcactcagagagaatttctctagtctactgattatggcagtgattaaataaaaaatgattcctgcagaggtgtgcttgaaaaaaatgattgtattatttgtgcttgttgaactttggataattcagcattcactattataatcagtaagatattggtttttaggctttttgggtaaagggtcaggaacccctttaaggtacatatgcacgtacacaatttccatgtataacacttctacatttttaggagatgacattcccctgcccagttaccatgcttagtcacacatcccatgctaaatgtgcttctggatagctctgtgtggcaggtaggtgcctgctgtaaaagatggcttttctgattagatctaggtgaaagactggggaagatagctatgttcaaggcagcctaacttcaataaaatttacaacttccagaattgtcccaacatggactcaaaagttggaaatagtctcttatatgagttgctaatccttttaatttaaaaaggaagcagaagcacctttacactttttgtttcctttctatttgagacagggtctcgcactgttgtcccggctggagtgcagtggtgcgattatggctcattgcagcctcgacctcccaggctcaaacagtcttcccaatcagccccgttagtaactgggactgcaggtgtgcgccaccatgcccagctaatttttgtatttttttgtacagacaggatttcaccatgttggctaggctggtcttgaactcctaggctcaagctgtgcacccacctctgcctcccaaagtgctgggattacaggtgtgagccaccacgcccagcccctttttgttttctaacagctaatttcattttccagcagatttcatgtttctggacattgtatttatttgttccctgaatttatcatatttatagcattttgtcttctgtggccagattgcaagctagctggccacaaaacaccagtgttttaaaagtttttaaagtagtggccagagttttaaaaatcagaaaatcttacataatttgatttctaactactcatgaaaaactagaatatctagcagtactgggctctattcttgcatgggacagtgggctggaatggaacagaggttgccccctcaggagggagtccaatttgctgtggtccccacatcacctgtttgctacctgtttgatcctctcaggcttttggttttgtcacccctgacttactgttcgtttaaaatcttatcctaaaaaatcaagagatctttaggttcaacaaaacaacctttttttttgttgaaatggagtctcactctgttgcccaggctggagtgcagtggtgtgatctcggctcactgcaacctccgcctcccaggttcaagcgattcttatgcttcagcctccccagtagctgggaccacaggttgcaccaccatgcccagctaatttttgtatttttagtagagatggggtttcgtcatgttggccaggctggtctcgaactggtctcaacctcaagctatccgcccacctcagcttcccaaggtgctgggattacaggtgtgagccaccacgcccagcctgatacctctctttttaaataaggaaactaaaatttaaatgatagggaaaaaaatgttgggacagtagggtgaaacaaatatttttttctttaaataaatttgtgtgttttatggctgggcctggtggctgatgcctgtaatcccagcactttgggaggccgaggtgggcggatcacctgagatgaggagttcaagaccagcctggccaacatagtgaaatcccgtctctactaaaaatacaaaaaaattagccaggcatggtggcgggcacccataatcccagctattcaggaggctgaggcaggagaattgcttgaacctgggaggcaaagtttgcagtgagccgagatggcgccattgcattgcactccagcctgggcagcaagagcaaaactacatctaaaaaaaaaaaagaaagaatggaatttgtgtgtttttaactaagaggaaggaaagaaagcaacaatgtaatttttaaaaagtattctttacaaatatcaagtcattatattagttttgaaacatataatgtcctttgtataatgtgatttactcacaaaaataccatgttgggaacatttatacaaatttactaattacatttgctcttaaatattttcattttatttttcaaatagaagtgaactactgaactcaaaggagttgaatgtttcttaggtttttttccttttaatagacaaaaatataaaactggacaacagaagtcaccagtgttttaatgaaacaaagaattagtttttgggtctggtaccttctaaagcatctgtagattttagaaaaggaatttcacaccaccaccaccaccaagaaagcccaaccaacctaaaacttgaataactgaacttaatccgagtcattcctattttatgagccatcatgatccacagtttctgtttcttctcatgtcgtcgtttcctttctgaaatcattcttgtagactgctgaagactaaatgctagcccagatggagactgaatttcaacctttttcatttttggcttcttggttttggggtgagagttcatcagactgttggtatacgtgacttgccaccaactctacagcaacctgctgtctctgagctttagttgtttctgagataaatgagatcatgtctgggccttcctcaagctctgacattctagaattccactattctgtcacatactgcacatactcagtgctgggtaaacctggagtactggccatgtaacaacttctgtggggttcaaagggcagagtctcagtagagatgggttcctaatgtcatcgtttatttctcatggctgccagtaataaacacgaaagaagaactaaatatagtgagttatgtactcaccagctcatggtattatcctgaacttgccgcactgagaggaaattctgtagctctgtttagtagatggtacagagtaaaccccaggcagagagttttcatcttcttgtcatcccgcagaatatttctgatgactagagctctcaggtctgtaagcctacccgtcttcaccggtgctcatgagacttggactaccctaatacttggattttacaatcctgggttatattgtttcttaatttttttttgtggtgggtccaaagccagttgaacaccatctcttggctctgatgagtcaaaattgtgaccaggacaaaaattaaatggcacagaggctttagcagagaaaacaaaacattttgtagaacatgctcagcacaggatggtgtaatggaggctgcagggggtgttttgctgtgggcctgtgttagcagtcattggctaagagcttataatggcacttagagcatggtacaaatgtatatacacacccacaaagtatagtgtactatatgtgcaatatactaaacctgttgtgcttgtattttatactaaatatattgttttaggaagttatttccaaaatagccaaaatacatcattagaatgattcagcactgctcaggttggcattaagtgggctgtgtgtgtaggagcaaaggagggaccagagttttgaaaactctggttttagaaaggatcttcttggctgaattctagactgtgttcctggttcctaagcctgataatactgtgtattttgcagctctttagattgcctcaaattcattgatttgtttattcatttattcaaccaacacatatggagtagctctaatatttacacagggccttttggcatgcggagtacattcatataccttatcccacctaagtgtgcttgtttcagagcccagtcacatgcatgggcaacagcctgcattgatgcattgattgatgaatgcaatctctatttcttcatagagtgtttctctttgctttctgttgtgcttgtaagcagagatatacgtggttttgtctgcaccatgtagaaaggaacttaggacaggtgggcaggagggttgctatgggagttgtgctggacagtcattcccaggaacagaggaggtaggaatcatcgactaagcatgagattggggtgggtgggagggatgtgattgtggctttgaggaagatggaaactatttggaacagctgacatgggttgggcattgggggctgagcaagagctgaaagcaaggcctgctgggtgactgagtggaagcttctgtgtcagcaggtgtggcctggatgtgtagggcggcaggtggagctagatgagactcagggacaaaaggagagggctgggggcaggggtgggatggttgcttggctgttgacataaggggacttggaggagctgtttctgaccctgatgtggccatatagggagttgttgaggtgaacagcaggggaggtacaggggccccgggggtgcttggcagtagcttttcttagtttggcttataaggcctttgatctcttagcactcctcccaccccacatgccctactgggccattcctgagtgcatactatcatgtgtacatactattcctttttttctttcctttggcctaattacctcctacctcaagtgttagcccaggaatcactcccgggcaactgtttctgattgctgtctgccctctcctctgctggaacccttcaccctgtgcatgcatctctccctttgtactgtacagactcatttgtaagtctctcgcatatgtggattggaaggttccttgggtgcaagattgtgcctcgtacccagcggaggacctggcatgcagaatgtgttcatgaaatgcttgctgagtggatgcataactcttttgttgcatcattagtagcataacagaatgatagagctgaaagacacctacaagatcagctagtctaagtcatttgtttcatagttcacagagaattgaaactcagaggggttgaatgcctggcctgaagtcacacagcttgtcctaggctgagccaggactcaagttcacctcctctgactccaaatgccatgctctttccaccacaccacagtgttctccaaatgtcttttatgtgtgtgaagacagcagccctctgcgtctgcttagtgcctggatacagcctaatatcactattcgtactgttatctaacttttctcatcgggaggaaaactatgttctgaccacgcggggagcttttcctctgcgtgcatggagccaggtttacaacaggccttacctcactgcttccccttccctttccggtttgtcctagtttatctttgggcagggtaagcatcagcaactgtttctaagtaaatagaggaattgcagattcaggatttgtggtttcaagtattcagtgtcttttgcttcagcccgtcccctcctggctgccatcactgcctcccctgtctccacattgccccgatttagcatgtgttgaagactggtagtgcacgatggaggtttctttcttggggcaagcagaagaaccaacagagcattgaaaagggaatctttgagagagagagagagagagagagagagagagagagagagagtgggcatgtctccgaaccattttgtgtcagttaaaaaaaacaaaccaaagtatatctgctggtttctggacccatccctggaagatggcatacaagacggccatctagaaatgcttgtttgtacacctcccttctccaaagtgcgtctccgagcttttgagcaacactgatgtttagtatgttctgtttagggttaaatttgcagcgtgactgaggctggggtgtggctagttcccttacagcctgtccatggatgacgcagttttgtgaggttggttccagatcgccacggatcatctgacctctctccccatcaccctggtctgaagtacctcagggtcagttccaggactgaatgctgggagtggggctgattggtttgaacctttggtctcctctgttaattaactaaacagtgcatggctaaaaatgtcgctttggggaaaagggctctgaagaacagtctttaaatccttcaccactttaaggagctctgcaatattgtttcccttagcgcttgtatattcccctcacctttttttttttttttttttttaaagtaagaagatgatgtacgatcttccctttagcttggaaatcctatggcttggaacaagcccggtgtcttcagtcttagagatttctgaagccactttggaccttcttcgcttctagccacatgggagcctgtgtctgatcctccctgggctggtcttgagttccaggcattgagctggaagtacatcagccaaggatttggctgtgtcaggaagtattttgatttgctatattctctgcttggcatctactcatttccttcagggacgtccccttccttggaaaaaatagctccaaagatgcttgtctcactgatgagctaagaaggagttccaaccaggcgtttccattcagggatcttggcttggcagtcacaggtcactgagtgagaagggtgtcaccacacttaaaatattcttaacatcccccttcccctcctgccagcagtggtctttatgctggctagttttgagaatgacagtctggagactgatccagcttggactagcaggccttaacaagcatgtatttctaaggtgtcagccatcacactgcttggctgtgacctttaggggatatcctaagtggcagccttccttgcaccctaacctcaagctctcctctcctccagatgtgcataattttcctgtgtggtgccagggaactgtggttataaatgagagagaaggggctctgtgggggtcccagaactgtgttgggatcctgtctgtgaagttacgctcatctgagctactggtctaattctatttttaaaaagggaaattaattgataccttttgacagtgagcctgtgtcagtttttggagtgacaccaaaatagagtcatcactttcttttcataggtattcatctatttaatattccaggctagaattcttcaggatgttgatcccaagcttcttagtgtatacttctagacccttcttagtgttaattatttagttcctcaatttcatcacctttccttttctcagaggtttctgaaggattactgatagtgattcatcagtgacagttcagattcttttagctgtctatggatgtggttcacctgagcctgaaaacccaaaaaggagtagctctcacttaaaggggctgcgactctcctagctccacacctgtcttctgcctcagtcacctcttaccagagtctccctttccagtaagatcattctcatagttggtggaggtggaaacaacacgaggaagagtggcttctcttataatatgacgagggcttcttcaagcaggtctgttatcatacgctttgttttcttcttggtctgatcatagatttttaaaaaagaacctccaaaacaaaaaacctaatggttatttcaatttcttatgttttaactcttcccagaccttagaacaagcttgtccaacccaaggcctgcaggctgtatgtggcccaggacagctttgaatgtggcccagcacaaatctgtaaactttcttaaaacaatatgggatgtgtgtgtgtgtgtgtgtgtgtgtgtgtgtgtgttgttttgttttagctcatcagctatcactagcattagtgtattttatgtgtggcccaaaacaattcttcttcttccaatatggcccagggaagccaaaagattggacacccctgccttagccttttggactttcctctgaccataaatgctgctgtcctttgttcagctttgactccattccttcttcctgtggcctagacatgcaaatagggcattccaatgttaggagtgctttgcagccccttaaaagattttctagtgctttcctggctcccaaatttccccaccctctttggaccacagagtttttctccaagctcagataacctctgactcctcatttgcccttccaaaaactttgcttctccccatggtgttctctctaattttaagctgtgactggctttctgggctcccaggcataaccatacagggctgtgttagtgactcagatcaggattcagctgtgctgaccacccagaacttattcccactcctactccccaagagaccagctcttcaggactcccacccagggcagggctgggtgggtccaccaatgcctctgccagggttgagttctccaggaccatctgggcctctccctgagctgaggtacaagaccgaggctgcccagcccctaggtcagagacgaaaggaaggaacaggctaggggtgggctggcagagagttcaggctccctgagctgggagtatttggggaagggaaaagaggaggaggtcggaaagtttgtgatgactctgaagactctcaggtttgtcccggggggactcaggccgccaaactgttcacttttctgcagctcggtgttgggagtgtgctctcttttggagtcacccatcctattttgggatgactgagtcaaaggagtagctctatcttggtgcctggaagtgcctcacatttcctcattttagacttgccattcttttcttaaggtgcttttcttaaggtgcttaagaaaagcaccttaattccattattaaagattcaggatcattaagactcaggctggattgaaatttatctctttactgtctatggaaaaagatttaaggagaaaaatcactgtgagggatgtcgatttaggaaagctttctaaagaacccactttaggaatgtgcatttgcatacaaacaatgaaagtgctaattaaaatgattctcacatcatcattttagcagtgcagggactgctgcttggcaacacttatgaagtggaaatgagtgtactttgaaaataataaaatattgttccatccattgaatccactaagacattaggtccttttatttgcaaggcactgtgctagaaccactgtgtgtgtttgtattggtcaagagtataaaacctagtccttgctctctagggtgaccaactgaggggtttccctgggataaaagactatcaggaaagcccgggaagaaccaggttgaattgggccaaacctacctcgggagttgaaaggctggtaggactgaacaatgttcctcaaatatttcacctgttgagataggccacacctgttcacattgttttagaaacagcattttgccctgtaggacgtttttgccctggaaattgagtagtctaattcccttttaaagcaagagcccaacatttaaaatatttctgtcatcattgtcgttattggcatcagctatcactgggcacctgctgtttgaggctgggactttgccctggagagtgggggtggggctgatctggcctggagatgatgtgaaaaccttttagctcctgggcgaataactgccaccttatctttttttaaaaaaagaatagtgttttagaacacggagcctggagcgcagtagatgcagagtcaatatttgtggattgaagtttattaactttgtggttgagagttcagggtctgcagtcacatagacttaagtttcaaatcctggctctgccatttgcctgctcgatgatcttggcttgtgacttacctctctgagcctcattttcttcatttgtgaaattgagataaacataaatttagttattatataatattaatgttcatatgataattatgacaggctgcatattgtggtatatagtaccacaaactcgagtcaggctgctaaagttcaaatcccccttcctagtatcataacttccagcaagttattgaacctctctgggccttaattttcttatctacaaaacaaggataataatagtacctttacagagggttgttagatgtgagaattgtcaagcacctcatcccagccataagaaaacattatatacatgtttgctaaaccttaaagactgtgaaactattattaattatttcattttggttcttatagaaatcctgtgaggttagatacagggcaagtattactccccactgcctcattccctatttgttgttattgcttgtttcgtatttgagggggaaaaatggagttctgaaaggttaaagtggttggctgaagggaacctggctagtaaatgttataactgaaactagaacccatggtacttgctataaaagatacaggtgtgcctatacacatttatcgagggcatgaagatattaaggctttactgtaataaatctgaagacaagtgactagggtatctccctcttctgcaccaccacccccaccaccatgtgccagatctgctggcatactgctaactgatgttctttgtgaatgatggcattgagcttgtgccctctcattgggtctctggggcttactgaggcagccagtttaaacctcttacagattctaactgcattaaagttagtgttacctgctctctggctggacttcctttggagaccagaagattctactatattccaatacctgatttcagaaccccttaggggagccatgtcatttgcgggaagctcaggcttaaataggaatgctcccctccccctacctttctgtttgcaatagaaactctttattgctcttgagaaacttaattaggagaaccatatatcagggagtgtaaacatagctttaaaacacttgccaatctcttgtcacctaggcagttatctttagattaaaacgttctcatgtttgttcacaaacatgggcactttaaaacatgctgccacatgaggggttaaaacataaatattatcctatatgagcaaagaaaggtgctttagtacttaagtcctatttttgagctgtggaattcaattccttcctgttgccagctgaacctggggctctgatgtattagatgaaaatatattcctatcttcaaacgtggacaacaggacattctgtcctccaaatttcagtgtttgaattgggtgttacaggaaacttggcaccctctcttttcaaaataataaacagacatgatgtggcttcatgtttcatctgatggggcttagatgctattgcctcataaaggctgattcacagacaaatggagactaattatagtagcttaaaaataatatcgctgtttaaatttggcaaggcaagatgcctcgcatgctttgtaggacacgagagactccgtttctttggtggcatggaggtgacatacccatttctatttcagccacacagtggtggtgctggttcattacctgccatgtttattttttttaaggatttcttatgatctctcacatatacccatgcacaaacattgaactctctcttcctataatctttacagggagttctttcctgctatctgtccactgcatttttaagaaacaaatgtctgggctgaggaaagtgaatggctttttgtttttttttctaagcatttcagaatctctactgtgaaaaattgcaggaagttattcacttctctctaaggaatggatagaggatgtctgtcataagagaccattctgattacttttattctatccatcttccccaaaactgtgcattaggttggaaaacagttttaatttgtttttgaatttgctttaaataagtaggtgatatacaaaattgaccatgtgcaaaatttaaaaattagtaaaaatgttttcagtgaaaagtaaatcttctacctctctcatatctaggatctaggtacctctctttggaagaaatcctgagcaccattttattctatactattctggagattttctagatatttataaatatgtatgtgtgtgtgtatatatatattatatgtagttcatacaaatggcacatattatctacaattttttttttttgagacagagtctcactctgtcgcccaaggtggaatacaatggtgtgattttggctcactgcgacctccacctcccaggttcaagcgattctcctgcctcagcctcccgagtagctgggattacaggtgcctgccaccacgcccagctaatttttgtatttaatagaaacagggtttcaccatattggtcaggctggtcttgaactcctgacctcaggtgatccacccaccttggcctcccaaagtgctgggattacaggcgtgagccaccgtgcccggtgatctacaatattttgaaccatttttatttaactgtaatcttggagatcattccacatcacacattgagatacctcattctctttaacagctgtctagttttccattgagtagaagtgccataatacataaacaattgcctatgaacggtagttaggctgtcttaatcttttgtccataaaatcattatataatgaataattttgtacatctactgtaggataggtggtctgtctcagtggttacaagcagggctctggagcccaagggcctgagtttaaaccctagtttcttcgtttacttttttttttttttttttgagatggaatctttctctgtcacccaggctggagtgcagtggcgcaatctcagctcactgcaacctccgcctcccaggttcaagcaattctccgcctcagcctcctgattagctgggattataggcacacgccacaatgcccggctaattttttttgtatgtttagtagagatagggattcaccatattggccaggctggtcttgaacttctgacctcaagtgatccgcccaccttggcctgccagagtgctgggattacaggcgtgagccaccgtgcccggctcttcatttactattgaggtatatatggtcttggccagttactttatctgtctgtgtctaagtgtcctcatttgtaagatagtatttatcttgtcggtaggatgtaacggttaaaatcactagtctatctaagcttatagacctgtgctggacatgtagacaggcctgtttgtatttactagtgttgtttcatatgatctggaaacacatgaatcctaagctattcttatctctgcctgtttctgaaccatctcagtagctttcagaagccataccacagttgttgggtctgtgggttacatcggtctccttgatttattcagatgtcacatttgtcctcctgtccttcatcattcccttgttacttttgtgtaacatcctggagaataaggaagatggtttttcaggccactgtactcatgggttcaaacccctttagaggcataaaatgtattgtcagtggtgataattttaaacaaatggtctgactcccctcccaaccccaaccgctgccgctccattcatagttaatttagaatcttacaatacttaaatatttacatttaggcaaatatatagctcatgtgtatgtatgtctcgatatttagtgaattatttcatcatgttttaagttataagttgaatctttggaaaagactgcaaagtgtcctcaccctgttttagtcgactttggaggtggatgttccagggccttacatcaccttaaaagactaccagttggatttagacaaaccagagctaaaattgccacatcggggtttgttagctgtctgaccatgggcaagtcacttaagcttccaaagctttggttctccatttacaaattgttccacctcatggagctttatgaggataacaggagagagtaggtgaaggactcagcagtatgcagcacagggcaggtgctcaagggccatctgttcttcccttccctctcctgccttccacttcctcctgtcactgcctcacggtcccctagaagtaccctccttcaccctttctttttgacacaggatcttgctctgtcacccaggctggagtgcagtggtgtgatcagagctcactgcagcctcaccctcctaggctcagctgatcttcctgctcagcctcccaagtagcttggactacaggcgtgtaccaccatgcccagctaatttttatttttatttttcgtagagatggggtctcactatgtttcccaggctggtctcaaactcctgggctcaagcaatcctcccacctgggcctcccaaagtgctgggattacaggtgtgagccactgctcctgacccctcctccaccctaacctcagcgttcctcctctccactctcctcctgactcatgccctatgatttaccagtgcgctttttctgcctttactgggagggcagtttacagctcaattgttgtcaatagcatcctaccttaaatgttaaccaaatgttcaatgaataaatgcctgtacatgagtgaattagaggcaggcttatcatctccctactccaaagaagtcattactatttctctgacagcagtaactagcaacagctttgcaaaatcagaattgggggcacagtggtgaatggtagcccctgaagtgataatagagcatggtattttcaaccttgattattcctttgaagcattttgccatggcccactcacaaaatcctttccccagatttttttttttttccaagacagagtcttgctctgtcgcccaggctggagtgcaatggcgtgatcttggctcactgcaacctctgcctcctgggttcaagcaattctcctgcctcagcctcccgagtagctgggattgcaggcacctgccaccacgcccagctaattttttgtatttttagcagaggcagggtttcgccatgttggccaggctggtcttaaactcctgaattcaggtgatccgcccacctcagtctcccaaagtgctgggattacaggtgtgagccaccgtgccccgccctttccccagattctattgcttgttgtttgggaatgcagcaggacatagaggcgatgtcaagaaactgtttcatctcatcgaagctctattagaaaggcacttgcatgagaactattttgactactttgctccccactttccaaggaaagcatgaactgttgacttgcagatttagtggtccttggtttaggttgttggggatggactacaaggcagtgggggtggtgacctgaggaagtaaagctgcagatggaaagggagcaggaagacctttgctaactcctccaaatcacttatttgtagaggaactactctattttgcattaagtgttttgctgtgaatttttgagatagcagtcacacccatatttaaatgtaagaattagagtgttttccaaagacatacaggccaggtctcttccagctccaaaagctatgattttacaaacacaaatattgggataataggaaccattgtttccacttggaatgctcttcccgtggaaagcattcatctctttcttatacagacctttctatccttcaaggtctagctcagttctgtctaacttttgtaattctttgactctggaatttttggcagttagttagatatggcattgtatgttgaagtgtagttccttaaaccttttgtcatttaggtgttttcacgtgtttatgcctcggccacccactaggtctttactctttagggcaaggtgccacccatctcctgtacccctacagatggatgtagttcagtggttctcgacaggtgccttgtagcagcaggatcacctgggaactagttacaaatgcgctcatacccactgaagtagatagaaagtctggggccagagctcagcagtctgccctttgacaagccctgctcgtggctgtgctgtatgctgacttttgagaacctttagtgtagtgataagagcaggggactgagggtctaagagacctgggtttgaagccagcttcaccatttactctctgactttgggaaagtgaatttgtctgtcttctctccccttctaggggtattttatgaacatttatgatgcaggatgttaatgggtaccctaagggttggggtgggtgaggggctctgtggccaaataagttgatgaaatgctgctttggctaatttaaataggattcttttgggcaagacttttcagatgcctaaatatgtcattgaaagtctctgagagtctccgtggatgttgcaaacttgcgagaccctggaacacattttctgctgcattcctgctaacttttccgggaacacacagtgttttgtggaacacattttgggaaatgttggcttagctaatctaagggtgctttgagcctggagattttatgaccttgtaaatcagtgagacatttagaaacttcaaatacagatttagtcagacatggtgccagaatctataatttgggtaaaccaggcttatagagaccaagttcaacattgagatgatatggaagtaattaaacattagagagtaaagggttatatttttaaaagaagtgagtttttgttaggtagaaaatggcatattaggggcaaggtggggaagataaggaaaggaaaatgtcatttactgagcgttttggaggcctggcagaaaacatatggcacatttaaatcaggtaatttaaggcgattttaatgaaggaactatttataaggggtgtgggcagagctttggaaaagcatcggcaatgacgaaggacttgattcctctgtgtacctaaggttttacacgtatcacattgtcattgtcatagccccaaagctggtcttattatttcattccttgcagaagaggagtgaagcccaaagaggcaaagcaaaatgcccttagataggacctgaaatggaggaggcagaactccactctgccctgtccggcccccagcctgcacctcctggttcacatttctttaggctgagcctccttatttccttcagtccttctctatgtaatgaggctgaaaacattgctttgtagaagctcatatttggagctagatgcgttgcactgagcaatcagtagacaagagaaaatagcaccttaggcaaataaatacattaataataaaagagtgcaggttccataagtgggaaagaaagaaagatcataaacacaaattttcatgtctgggtgagttggggctgtggaaatctgtcatccattctttcctaggatccatccatcctagaaaatctttctggaggaagtgggaaccatgtaaaggacatgatgtggcagcttagcttgtaggggctgggaagagggagagggaaaatttttcagacaagggggcactgcttggggaaggcctagcagtgagagtggaaggcaagggtgctccttgcgtgggtaccttaacaaaatggcagtgtgggcggtttggagaaagggtcaccatgggatctgagggggctgctgaactaccagtttttatatctgggccgtgctgttccagtgaagtctctttagcctaacacctttgttagaagatggtaaagggctgggcacggtggctcacgcctataataccagcactttatgaggccgaggcgggtggatcagttgaggttgggagttcgcgaccagccagaacaatatggagaaaccacatctctactaaaaatacaaaattagctgggcctggtggtgcatgcctgtaatcccagctactcgggaggccgaggcaggagaatcgcttgaaccaaggaggcggaggttgtggtgagatgagatcatgccattgcactccagcctgggcaacaagagtgaaactctgcctcaaaaaaaaaaaaaaaaaaaaaaaaaaaagaagatggtaaaggttgaattttctaagaattgattttgcttcctttgggaagtttcagagtatatgaatgctcagtttctcttaagcccaaagataatttagaagtcatgtttctgtggaggtttctttccccattgtgagtttaaatttggggcggcttttaatgctcaattagaatacttcttatggttaagtactttctattccaaaaaacaaaaacacctctcaaatcctctgcacaagacctgcctttgaaaacatctggtaaaaataacaagtcacttggaaaactgtgattctcaaatggacccccgcctcttggttagtgggaagtcactggggtaaacctttatttcctgttgcttccacacagccggcccttcacggaaatatttcacatgtttcctcaggcagcagggaaccttgaagggcagacagagggctggggccccagataggaacacagttgctgtctttgctcaatagcgcctcagggtgtgtggagagccagcctctgcctttgaagctgggccggctccctgcccctaactgctgaaaaccccagctctccccaagccatgagcaaggcccaaacttgccacacctctggctctttttgcaagagagatgttttaaaatagtcttaaatgtcagacatattttttttcacaacatgcctcagacatctcataaattattctgcagtaaaactttaataggaatgcttagaaaatgaagagttctagtcaatggagtttttggtaacttatacaaccgttaaccccaaatcaccctactttttctaccccagaactcattgaagaaaataatttaaaaatagagatgatttttctgaacccatgttagaggctgtctttgatgactgaggtcttatgtttcttcataatgccatatgttagtttgaacaacgtgatattccaatatttgactattttttactttaaaaagttaatttgagatggttcagtctgataatatgtaggaagtataggagttggagttcagtgttttctgaccagaatacaccgataaagttgattattttttcttagaaaaaaaaaaaaaaaagaaatctgcgatatccacctttcttgccatttgcttccttctcttgaatatgggtaattaaagattctggttgcagaatttgcatggttgctcaagctgtgtctgctgtcacattggctccacattggggctcttacaaatatgtgtcacatctatagctgtagatctaacgagctctctttcgtgtgcacatgcttctgtacatgagcctgtgagccctccttccttttgtggtttttcagtgttgtggcttagatttatttctatttataatgcttactgtcttgatttattcagttactagttcctgaaaagttggaatttgggaagttttttctttttctttttttttttttggagatggagtcttgctctgtcgccaggctggagtacagtggcgtgatcttggctcactgcaacctccacctcccgggttcaagtgattctcctgccccagcctcctgagtagctgggattacaggcgcctgccactacagccagctaattttttgtatttttagtagagacggggtttcaccatgttggccaggctggtctcgaactcctgacgtcgtgattagcccacctcggcctcccagtgtgctgggattacaggcgtgagccgctgtgcccggccagaatttttttttttttcgagtcttgcactgttgcccaggctggagtgcagtagcgtgatcttggctcactgcaacctccgcctctcgtgtttaagcgattctcctgcctcagcctcccaagtagctgggattacaggcacccaccagcatgtccagctaatttttttgtatttttagtagatatggggtttcactatgttcgtcaggctgatctcaaactcctgacctcgtgatccgcctgcctcggcctcccaaagtgctgggattacaggcgtgagccaccacgcccagcccagaatttttaattattgggacagagatagataatttgagctggggctgtcctaacaagtctggaatatgtgctacatcacagaatcatgatcatcaatgcccaaagtggtgctgcatagatgcctttttgcccataggaagattcaatgatatttagatgctagcatacttcgtttcatgatatttctcattctttaaaaattggacttgctaatttaccagtatatttcattatctagaacattccattaactctatatttggcaagtgtttgaattgagaagaaatttcaaaagtgagggtatatttcctagtatctttttttttttttttttttgagatggaatctcactctgtcgcccaggctggagtgcagttgcgtgatctcagttcactgcaagctctgcctcccgggttcacgccattctcctgcctcagcttcccgagtagctgggactacaggcactcgccaccacatccggctaattttttgtatttttagtagagacggggtttcaccgtgttagccaggatggtctcgatctcctgacctcgtgatccgccctcctcggcctcccacagtgctaggattataggcatgagccaccacgcctggcctcttttgcctttttatgtgaaatcaaagcaacaaaattgtctcttgcccctttacttcatccaaggcaccgtgttaaaattcagaaggtgtatttgcagtgactaaagaattttgcttctctttaaatgtgacactagcatgacgttctccttaccatttggtctgtaggaaggcaaagctagctatctgtgacttgactcaggacagcatcctttgggggaaacggtgctgtgttgaaaggtagagcccttgtttcattcctgtccaggtcccaagctcactctgactttgtgggtagatctgagtttgtgggtagactttttccttttccacctggactgcttcctcttctatacagtgaagatgtcaaactagatcatttctaaggtctttcacaacacagtaaacccaacagtgttttttattgactactttccacttcacagggtcctgagatagttccaactgttaagagagcatttcacacctgggtgttttcagaggtccctcatagataagtaaaccaagaaaacatgtttgttggccattctgcaagagcagagagaatgccagagtgtgcagagtattcagcccttccttcagagagttatgcgtggcttggagaagaataaatgatacgggacctgtcacatgtgtgggacaaagagtgggctagacagcgagcaccctgagtgacagctgttgtttatcaaacacttgcaccatccccgactctgccaggtgcttttaattgctttacctataatatcctaatcaagccttgtagtaaccacatgagaggagtgccctgtttaccctgttttacagatgaagacaccaagataatttgcccaagtttccatagccagtaagtggtggagctggtacctgaatttgagccttttttttttttctttttttttttttaagacagagtctcgctctgtctcccaggctggagtgcagtggcgccatctctgctcacttcatcctccgcttcccgggttcgagtgattcccattcctcagtttcccaagtagctgagattacaggcacgtgccaccttgcctggctaatttttgtatttttagtagaggtggggttttgccatgttggccaggcttgtcttgacctctagtgatcctcccacctcggcctcccaaagtgctgggattacaggcgtgatccactgcccctgcctgagcctacattcttaattgccttgcctctaagaaaaaagatgaaggcacagacagagagaagaaacaggactctcttgttaaaggaaagcatggaattgccaggggttaacaatggcaggagaacgggacatttgtgaccatgggctacttaggtggacccatttcctgatggttctctcaccttggttacctgtcactgccttgtgggccctgggggacactgcctctctattaagactctggctcaagcttggccagaaaaacctcctgccacccctcctccagcactctgccagtgctaaaaagagccttgtgtttactggaacttgggatatcttttccacttgagttgaccagagccaagtcaaggtagtaaacagctggactgaaacagccatttgggattggagggtgaccccaatagtataactatacaaaggctttaaaaatccctttccaaattttccaaaacttggttttactttaaactggtattttccttttaatgcctccatttgcagaaccaaaaattctcagttttggaatttgtgctgtgaaagggtcagagtgaacaatgtgaagcatcctcattagctctgtttatttcttggatggaagggatcacttgtatctgctcatggggctcaggacaaacttctgttcactgtcactctctcagcagccatcatcagtgggacactggccaggcatcacatggcttaaaaaaaaaatcagtgtcttgcttttaagcaccctctgtgcgttggattataagaccactgcctccttgaggggcagtgatgatattcatctccatagcctggcactgagcacagcatgtggtaccaaggagacactccatgagcacttggcatatttgttgagcacattcttttaatcaccatgcaaacaaatgcaatggaaagatgtttttaaaatgaggtgagtacaaggaagggaaatgcattgcaaggcacagctttgtagtatgaggcatgatagttcttaagagccctgggatttagggtgggatagattgggttatacatcacaattccaccacttaatggtagggtgaccctagagaagacactggatcattgcctcctttctaaattggtaacagtgcctacatgataaggctactaggattaaatgagatattgtatgtaatgtgctaagcatgaggggaggctcttgatgataacaatagggttttttttccctagcaataaatacatcaaatttagctgcccttcaaaagaagtgggaaggagaacttgtgtatatgccccctccctgaccaaagaaaaaaagtttgcatgttgcacagtggtataatactgaatgttttgcaattacctggatcagaggcaagttcagcaggatatgagtggtcgttgtggaaatgtagttcaacagatttctgaagtctggaaaactctttatatagaaaacatgcagaattagaaccatatttcaaagcttttatagcaagaagaaaaatacttatgagacaatactatacatatactgtgaacgtaaccagataatataaagaaagattacagggaaattcagcaaataatgagattgtgttagggtggtgacattatagatctttttatttcattttcagatgtttagttgtgtgcttatatttcttttgtagtttaaaaaacgctttcaaaaataaaacctattcaaaaaaagcttcactcttgaaatgagttgaaaaagagtcttcttacaaaaagtttgatacttgaatggctgcctttgaattttttagttttaattgcttttccaattgttttctttaagaaactttttctgttgctgaataatcataaagactatacttagtgaaaacacatcgagaagttggaatttaagagtttgatgcaaaatggaaattttcctttgaaaataatgtgataggataaagtattaatggactattagagatcaaagcctgtctaattaaaaagtaaacacttgctctttagatggcatcacagatgtgtcaaatatatccattttttaagttatagtcattttatggattatgatatgaaatagtcttaaaggtagggtgcatttcaattctttgctttcctaaacatccaggcttagaaatatttaagttaatggatgagcatagtcctagtaaacttctcactcggaaaccctgtgccagactgtgtgcagatggggcagcagtcatgactggcaggcccagcaagtggaatcacatttgcacattgttttattcactgtgaacatttttgcaggaaaaaaaggaaaaactgtctccctgcttaatgcaattctgacgcgatcagtacaaattataaattacatttaaagtgatggtacaaattagtgaacatttccagctttgtgtgacagtttggggttgagcatcagcgtttaatacttggtgttgccgtcacttggttgtattgaccaacatttctcaaagtatagccctaaatgacatctgccagaaatgcaaattccagggcccccttggaacttcagaatcagcatatctggctgcagaacttgtaatccgcattttaaataagtgcctccccaggtgatccatgtaaagcagttttgttgaggccctctagtacatacagtgggaacgtttgcaaagattatttgttatctcaatttaagatacttatttttaaatccagagaatacaaatgtataatgaaagtttgagagcaaagctgactgattttgggtccatatttttacttatgagtgagatttgagacttcaaggcactgtgggtagtgtcttcaatttgtgcaataaaattaattttcaaagtacaagttagaaatttagttgaagggcacatgtgagaataattttaaaatgctcttgctgtttttccgaattctccaactcatcagagttgacttagaacagcattgcaagtagtcatttaaaatactttctcaatatcaataagaaaacttgcatttgagaaaatctctgattattaaatcatttgtgaattcataaaacagtaaatttggagaaaaagggacgaagacagagacccaatgttatatcaaggattataactaatatttagttcaataattatcattgggggtaaaagtaaagataatattcattcagttatctgcaaaagagatgatgatggttttattagggtcttccaaccacatacttacatgaagcagcatttttggcctttaaagtaaagaaatcaaagccaaaaaggggtcagtttgtttctggctgtactctgtataaagttattaattttttttttttttttttttgagacagggtcttgctctgtctcccaggctggagtgcagtggtggaatcacagctcactgcagcctcgacgtcctgggctcaagcgatcctcccactttagcctcctgagtaggtaggactacaggcacacaccaccacgcccgactaattattgtattttttgtagagttggggtttcaccatgttgcccaggctggtcgcaaactcctgagctcaagtggttcacccgcttcgtcctcccaaagtgctgggattataggtatgagccaccacgactggcctaaagatatttttaagggactgacaattgggattagagagaagcaatcactttgaatatcttaaaacttctttgagtttaaaagtgatctcacataatgtatctgtgcttaaatataatttcttaatgtcacttgtgtagacttcagtgatagaagaaataagatttaaataaaactttaaccctctgtttagtgaataaatttatatgtatatttttatctttataattttaatgattcttgtaacgaattggtgtttctttttcccctgctgaaacaatgtttgggctgggacacattggtctccttttcatcccctctgttttgcttgtctttggggactcctcacccctgtgtctcattctcctccatctcctgtccctccttggcagcaatggggtcaaggagactgaatgtggacctgacacatcctacagagaaaccacactttgtttccaggcaggatcagaagtacttgactaggcagcattttggttttgcagttccgaggcaaccccaacgctgcaaaggcatcttcacattggaagaggcacactcgaaggatgatttccttatcttcctggcagttgcctgaaatctcccttctagcactgtgatctatgagctctcacgcactcaatttattttctttgctaggaattgctagagccatggctgggtcaccctttgctttcctggcagctggcttcactctgaacttaatgaggttgcagagctgaggggccacggaagggtttcccccgttgaaaggactctgctgcttgtccctattaaaagagtaaatgctgactgctgggtgactccaaggaagggcttttccagccagtttccatgtggtcagtgtctagggcacattccggagcccgcctgctcctccttttcttctctttggactttagtgtaaccagcagtgaacaaggaatgtattttaaatgacatgtagatgtaacttttggagtcgctgggattttctgtccctatccactggtccatttatcaaagtctgttggcaaacttgtgtagccatcccggatttcatgctacctaaggcctccctgcacctgattctctgcatttgagcttgctggttagttgttagagctgcgatattagcagaggggaatttgaaatgcttcattaccattctgagagttcaagtgttttttatttctgtttttagtaagtgcttaaaacacatattttagtttttttcccttacaatctagtgtataaaaatcttttaaacttaggcttcacattcttacagaagaaaaagcttatttatttttgtacttttattattaaacagataggaaaaaagtctacaattacatgcttcttaagctggatttcctccagaagtgtaatatattcaccaaactccacaaataccagagctccctttaagcatattgggaaccaacccaagagttctaaagttacgtttttcctgaaggatttttgttgcatacttggaaaaaaaaaaaaaaggtgcaggggaggtgaggtggggattcttgtatgggacctttatcctttcccccatctctatagtcttcttaacatgccctctgtcagactttttgatggtttgctctctagatattcaagatataaatttaaacagtgagatccactattcaatgccccacatttagttcacatttagtgaacttttactgaatgaatgagctcagaagcaccaaaggacatttgtttgtggacttgctttaagttaaggattttttttctttttctttctttttttttttttttttaggagaaagctgacctgagcaaggtggtgcatgcctgtagtctcagctacttgggaggctgtggcaggaggatcacttgaggccaggagttcaaggctaacctgggcaacataacaaagcccttttctctagatagctagatagcaatttatgcgccaactcagtacttgtatatatgactttagttttagagacacttggacctatataaatgttaagaaaccttagattttaattctcaactgctggcttttcctttttaagagaggaagggaatgccacaatgaaattttaaaagcaatttagaaatatttgagtgccctcgtgaatgaacaaacatcatacaagcacacatagatgactgtcttcagggagtgtaacatctagaaagcagagcaggactacagacatagtaattgtaacatctcctgctgacatggcttgccccttgtcctgttggaagggcttggcaggatgagagttatttgttttagggaggacgtgtacctggacattgcattttctcatctcagtgtattgatcaggactgtaaagcccatgacatttggaaactgtgtttttttccagccctgaaatgcttttttttcttttttggtagggatattttattcttttatagacttaggggtacaagtacagttgtattacatggatatattacatagtggtgaagtctctagccttgaaattctatgatgctctgagtcctttggcctcatgaaacattcttaaagatgatattgccttgtttttgttcttgtttttttgagattgaactcaattactggcctgtttagcagacagccaagggcactgctgtcctgtcgcctgtaaagttctgcacaaatgcagggtgctggatggagtcactacaagctttgtgttgagttttctctgcccaaggcaaaagccttcattcctggcaatgcccttgtctccatgcagggtccagtacattgttgttaaagtaaaacagtgactaactagagccttttattaaccaggattccacttctgactcttctcacacttcatttttggagttagaacaggataaataaacaaattatgtcaataggtgaccatttactgagttcttcctgtgtgtcaagcactgtgctatgtgggtaaatggttatctcgattaatcctcacaacagggaggttagtgctgcttttattcccgttttgcatgtagggaagctgtacagtggtagcgtcactgcctgagcacctagaattctttgctaacagggttgtgtgtgaataatttaattcgtctcttaagatctcaacacactccctccctggcccctgctgtaaacatcctacactgattggaatagaatacatagttcttttcttccaacatggtgtgttctattgatacaagttgtgaattgtggcgacaaggccattttgtattgagaaccattctctttaacatttgttagtttggaaatgctaaacatccctaactctgtcaccttttattccattgtagtggttgatatcgtagtgtctttatttagttataataagcgtctttgagttctaaaggatttttcgacaccttttattttctgataattttatcttgtcatccaccaaggcaattgggcagaaaaaaagcttcactgtggacaaaagtggcaaaatgtgatttagggagtgtactcagaaaatcagattctctctcagcagtagtttttgctacccataagcaagagaatacaaatgtagaaactgtcacctatgattgctgccagcaaggcttctatggagttttcacagccaaatgagcagaacaagtttgctgggagctcctctcctgggcagagagggtatatatggttgaggcgtatttctttttttttttttggtcttataaaaagcactgggcaccactgcccctcttgtggcccaacccgctcacaggcagtcagcctgcatgctctctctgccccagggccccacctctacagtgcattctgcctgcttcagctggatcaatcactgtcttaacttgtttcttgctgcataacagaataccacagactgggtaatttatgaagagtagaagtttgtttggctcgcagttctggaggctgggaagtcctagattatggaggggtcgcatctggtgagggccctcttgctgcatcataacatggtggactcatccttttatgaggagcccactctggcagtaactaacccactctcttgataatgacagtaatctattcatgagggcagaggctttatgagctaatcacctcttaaaggtctacctcttaatattatcacaatggcaactagatttcaacatgagccctggaggagaccttcaaacctttgcaatcttgaatttgaaaacttctcttctgcagaactctccttggtttcatggcccaacagaatgtcattgcctggtattcaaggccattttgtggtctgtgtacaccatctacataatgttatttccatatactctgcaatacaaaccctttgcattaactgaattggacttgggtctattctgtgtgtgttctgtgctatgttctaaacattacctatgtgagaattgctttggaaactctagacactttgtgaggaaaacagtttgttaaaagcagaagacatggtagacaagtttttgtttgtttgttttgagacagggtctcattctgctacccatgctggagtgcaatggtagaatcatggctcactgcagcctcgaccacccaggctcaaaatcagtccccctgcgtcagcctcctgagtagctgggattacacgcatacggcaccatgcctggctaatttttatacttttgtagagatggggtttcaacgtgttgcttaggctggtctcaaactcctgggctcaagcgatccacccacctcgatctcccaaagtgctgggattacaggcatgagctgccacacgcaatgtggaagacgggttctgtatatcctggaggaagtggtaaagttaaaaaaaaagttttacatgtaaatgaagtgatacctagccagtaacatccatgagtattaactgtggggagaaagaggagactagttactttacttcttatggaaagttatgagaagattgtgctcttggggaaagaccggacatgtcacctcatgagggagagaaaggtgctgtaagctcttcaaaggagcactgaccgagactgttcttttaattagcttgaaaagactcacctctctatggtgggaatagaacatctgctgctactcagagaaaccacgtgaggagaaagtggttctgacccccgccccagatgctattgatgatgaggatcatgctgaaagcagctaaaatttattaagcattttccaacgttgtaataggcactggatgtactgaatcttatttaatcttcaccataatgctatgagattgatggctgttattattcccattttatagatgaggaaactgaggcttagcaaggttaactgactaaccacagaagacacatctagtaagcgtcagaacagcaactcaaatccaagttatactaagtctaggtatgttggtgggtgttgttgcttcctaaagtctgttagaaaattctgtaggtgatcttattcccttttaacttcccctaatgaagattttctataaagaaattgatatcatgagaactatgggctatttggtgcttttgtcagcatgtgcctgggtgtttcccaggtaagttgtgaagcttggcattctcttagctggaagattcctgcagtagagggcagtccatggatactcttccatgctgtttgtagtggctcatcagggtttcaagggttagccttatctctccaattagaatataaagtctctgagggcaagcaccatctcttatcttgattgataacttcaataattttattgccacagctggatgaaaaagcacccaaagaggatccgtttgtctttgttttaggtctgtatattctccaagcaacctttgtacacaagagcatcttgctgcaggcagggactgttttgtgtctccttggctgggttcatgtggcaaagtggaaggagcctgggttgaggagccggagccaggacctgtattccagccttcccgcttgcttctgcaagacttttcaatgagccttctaacttttactgaagctcagtttctccattggcagaataggtgtagaaaccttactaggtgttctgaggattaaaaatgacatgatgtgtcaagtggctggttcacagtgagcatttaggaaatgaagagatggttctcctctgcttctgtagtgtgagcacagggccttgcacagaatgcatacacaatcagtgtgttttgataataatggtttggttctttggcacctgaacctaaggagggagcaactgtgaaggcttttaaaacatgatgcttttttatcaagaatgtccttcattgccagacttggcataggaaggcagacctggaaactgactgtttggttcttgaatcctgcttcagttcataaaacctgatgtttggtacaggtaagtattggtaatatcaacctcataatcagatatacaatgatcacattcattagtctgttaataaacaaaggataacaaagaatagacccaatacctttgctagaatacttttccttttataacacaacaatttacagtgtttcatatatacagttatctgtcagtatgctatagagattggtccaggaccccacgtatacccaaatctgagcagacttatgtcctgcagcgggccctgcagtactcacatataggaaaagttggccatccacatacgcagcttccacatcctacaaatgctatatttttgatccaagtttggttgaaaaaaatctacatataagtggaccctcacagctcaaatgtgtgttgttcaagggtcaactgtattttaaaatttaatcttaagaacaacttaatgggctgggcacggtggctcatgcctgtgatcccagcactttgggaggccgaggcgggtggatcacctgaggtcaggagttcgagaccagcctggccaacatggtgaaaccctgtctctactaaaaatacaaaaactagccaggcgtggtggcatgcacctgtaatcccagctactagggaggctgaggtagctgaattgcttgaacgtgggaggcggaggttgcagtgagccaagatcgtgccattatactccagcctgggcaacagagcaagactccatctcaaaaacaaaacaaaacaaaacaaaaaacaattaatgtaagtaggttttttgcttttgtttttgtttttttgagacagagtcttactctgtcacctaggctggactgcagtagcacaatcttggttcactgcaacctctgcctcccagattcaagagattctcatgcctcagcctcccaagtagctgggactacaggcatgcaccacaacacccggctaatttttgtatttttagtagagacagggtttcaccatgttgtccaggctggtctcaaacacctgacctcaagtaatccgcctgccttggcctctcatagtgctgggattataggtgtgagccaccatgcccggactaaagtagtatttttaatttccttttatggatgagtaaaccgaggctgacaaattaagggacttctcaatttgcacagccctgccaaagtttggattcaaattgagttcttcttacccggctttttgttgctttcctgcagccaccaggcacatatacaactcaagtcagaagtgtgtgccagatgccaactgagccagagtccttgtaagcctataatataggcaaattgtgtgtgtgtgtgtttatatgtgtgtttgtgtaaatataaacacagagagactaatttttatatattaatatataaatgtataatgccaacctatttctaggtagtctggaagacaatatagatttaaaaaaatactttcattgaatttttgctgtgagcttgatattatgttgaatgttttagtggttttatcttggtttgaagaaaactcattacagaaatttgtattgtaatttcagtggttggatgttgtgcttttatacctgatatattcaaaaattgcctaaaattagggtaaaaataaacaaggatagataaaagtagctaatgtgatatgttcactggatgagtgatgggagccaaggtcttgcatttattacagtgaggtgctaatgatctgatttggtccatggcctcagagcctgtgctcagggcttattgattttgggcctgtatatatgtgttccacctcagttgttaaacaaatgccaccgagaagagaggttttctcagaaaagatggtgtttgcagtgttttatattacctttttggtaggttagtatatattcagttacaagttcaaaacttcttaaggaaaataagcaattcctgaacaagccagtattatgaactgaagtatttaagttatgtgtttgctaaagacccaaagtctttttactgaatggagcctctgttccctcattcctgagcatggtatgggtctgtactgcagatgtctgtataatatatgatgtggtaaatacatagcctcagggattttgtggtttaaaaggaaagttgagagggaactgtggactgtctgtaagagcagagacctctcctgccatatcaaacccaccctgctttcccattttcaagctctaacagactgcttttcagctttttaacattttttttcccagccatacacagtacttcttcatctcgtttacctatattgtggactatggccctaccttgattctcctgagaatccaaaatgctttcattcatggcctctcactggtagacattgtatagcgactgcttcagaagaaaaatggctctgtgtcctgggcttgtgtttattattttgaggttatatatttatgatttaaacagagttaagatgtcttgcttttatctcatgaatttcggaatctgccctattttgagttatctggattgtctaaggagaaggctccaaatgtgctgaatgccacaattagacagctttgttttggttctgtagacacaaccatatttgggaaacacgaataggctagtttttgcatttaagacttgtcttggttaactgcgtattttagaaactgtgtgtgcccagagttttacatataaaggatttgagaaggagttcagggctctggaatgccatgaagctgggttagaagcagggacttggcagtgagcaggcactgggagcaatgggggtagtttgtgtgttgtcacctggcagctcctgctgactattttaagatgaaatgttttggtgcgattgcttctttaggaaatctggctgaacagtcgagtccgtttattgcccccttcatcctcctgaggaacttcatgggagtagtttggctttcattaaacaaaagcagtcactgatggtgaatgttagaatcccacaagttccgtggaagatggcatcaggtggctctgccatgttctaatggacatgactgtcagtggcatttttagcttgtctcctagaattttttctttcaggttctaaatattacacaattgcatatcaaatgtcacgtaggagctaaaaaggatatttgtcattagcaaagaaatgtattataagcacattataaacagtttagaaaatagaaaaaagaagttacccataattctatgctaccacaatcactattagaatttggatatattttctttttactatatacatgcgttttgcctattatataattataaccacagagccgggcacagtggctcatgcttgtaatcccagcactttgggaggctgaggcaggcagatcacttgaggtcaagagtttgagactagcctggccaacatggtgaaaccctgtctctactaaaaatacaaaaattagccaggcgtggtggtgtgtgcgtgtagtcctagctactcaggaggctgaggcaggaggatcgcttgaacccaggaggcagaggttgcagtgagcagagatcgtgccactgcactccgcctaggcaacagagtgagactccatctcaaaaaaaaaaaaaattgtaatcacaaatgtcacacagacttataccctgctgtagtcacctaatcttacgagaagtcttttcccatgttgtatggtctatgttagttattctcataactgttcaacagtccccacagtgggtatgtggtcaggtaattagcccctgtgttattgaacaccagaggatttcaaggctttcactattactaataaagctatggtaaacatctctgtatgtatagcattattgtcattcaagcttctttctttagactagattctcctaaagcacagggatacgaggtgcatagctcttggtgtgtattgctgaagataatgataaaaatgtagtgtcattggctgtgtaggaaaaagccaatgtctttgcatttgcccacattgttagttttaaaaaatttttggactaatataagaagtagaaaaaatggttagtcattattttaatatattttttaactagttgggttaagtaaacgttttctcatagatttgtttattatttgcattttgtcttctgggaatcatttcttcacgtatctaaaaatatttttcttggcaattagtatgattacattagattaaggatattaacccgtctatcttgtttgctgcaagccatgcattttaatatgttagacaatgtaatatataattacaaattatcccctaaattctgttgtttgaagcacaaataatactgcatttataagacttgaaactgtttggggggctgaatttgcttattgggttggaagtcaacattttatatttatttaaaagctccactcaagtataaaaggtaaaaaaaaaaatgattgcagatttattggtggtgaatgttctagctccagatctgccccttctctggcatggacctggaacgagagtttgatattggtagtggagtttgggcatgggctttctgaatattgtgatcataaataggtcttattaaaatgagttcttggctgggtgtggtggctcacgcctgtaaatcccagcactttgggaggccgaggcgggtggatcacttgaggtcaggagttcaagaccagcctggccaacatggtgaaaccccatctttactaaaaatacaaaaagtagtcaaggtggcacgtgcttataatcccagctacttaggagactgaggcacgagaatcacttgaacccagggggtggaggttgcagtgaaccgagattgtgccactgcactccagcctggatgagggggcaagactctgtctccaaaataaaagagttcttcatcttcatgacttttaatagggatcaaaaccaaaactatttctagccagtgtaactacagaaaataaaataaaataaaaagtagatgaaaataaaaacctttagtttttgttgggccaatgcatctggctattgggattggccttaaatttggggagatgagggaaagggcattagtgggaagcaacaaggttaaaggcttagaaatgggaactcttgtcagaattcagtaggaatagcaagtgtggtacatgtggagtttagggctcatgggaggatgtgagggagatgagactggaaaaataactgggacatgatcctgcagggtcttatggcacattaaattaggacttgaatttttagatcagtgtttccaaaagtgtgacatttgaggtgattttagaaggtatgtcattgaacattggaaaattttggtatttattcattccttattctctctgtcatgcagaatttattccttttccttttgtgctcccatgacacttaagccagattgctagcagaagggttatcccattgtactatatttaaatggaccacatctgccaccctacagccctgtgttggcctcaaagacagcaatcctgtctgatcatgttggtctcccctgggccaagcactttcctgggtgcaaagtaggtactaaagaaatgtttttgagctgtatcatcaggcctgtgttttagatataatattctttccggaagccttgctgcctttcccttgcctgccatactgcccagccaacccctctgagtgtataggagccctgcggagtttttttccccattgaaatttgacccaggttgaattgaaagttggggagtgcataggtgggtgccagcacagtggctggagggggctcatggaacctccttccaacacagctggaaaaccaggaaaatgggctgggtaacctatatagatgcttctggttctaaagaagtgagcatgtagttggaacagaataaagaccagctgagggccctctggctccctaaactcctgaagaactgcagaggccctgttctagaaggatcctcatggcccagtgtaaatcagtttacagtgacacttagaaatcaagaccagaaagtgtggggaggaggaaggagttaactgtcttaaatgcagtggaaagatcagtgaagcctggaccagtgcagaaaccgttggacttggccatgcgtgtgcactggaagtctttctgaaggccatttcagataattggttagaacggaaactgagttggagggactccaggaggaaatgagaggatgtggaggatggcctttctgatgtgttttcctattgctccctctccagaaacattggtctttttacagaaacttcgtgcttgttgtgttctgagctcccaggagtgtcatgggattctagactgaagttaatgtcagggtcaagtttatcccactttcttccccttgaacggaagtatcagcgactcagtgtttatcctttctggctttctgaagagccttctgcaccctttgcaataatgtagagggtgcatttgaagagaagtgacattaatagagattgagaagagaaggagctgttgaaaaattggagaaacgtggctctgctagtggatctgcaaagtacaaagaaataaggccaggcatttattctggggctctgtgcgctgtctctattcttttcaagctgttggaagtagctgtacgtatataaaatcaagtcccagattagattttttttttttttttaaatacagggtctcactctgttacccaggctagagtgcagtgagcaatcttggctcactgcaacctctgaggcctcctgggtccaagtgaccctcccacctcagcctccagagtagctgggactacaggcgtgcaccaccacacccagctaatttttgtatttttggtggagacagggcatccccatgttacctaggctggtcttgaactccagactcaagcagtctgcctgcctcagcctcccaagtgctgggattgcaggtacgagccatggcacccagtaccagactgggtttttttgtttttttttgtttgtttgtttttgtttttgagacagaggcttgttctgtcacccaggttggagtgcagtggtgcgagctcagctcactgcaacctccgcctcccgagttcaagtgattctcctgcctctgcctccagagcagctggaactacaggcgtccaccaccatgcccggctaatttttgtatttttagtagagatggggtttcaccatgttgtccaggctggtcttgaactcctgacctcaagcaccggcctcccaaggtgctgggattctaggtgtgagtcattgagcccggcccaagattagattttaaagctaaggcataaccagcattttgttcaagtggggagctggctcccttttaaggagccatggtggagttaaggaggctcttgattatcttgaaggtaagactctgaagttaggttccgaaggttaaacagaggcgagagcaaaggccgtgactgagcacctactgcatgtccagtgctgaggatgatgcagttttcctttccagatatttacaatctattgttggggatgggggagctatggaggcaaaacaccatagtgcataggagaagctggagcatgctggctaggagatttaaaggctgtttgttttccaagaacctttgcaggaccttgaattcatttttacagacatgctcaatttcttcctagtcatatatccctaaactacccatataaggaccttctttcctttcccagtaaccaacccatatttagttgattgtttttcagctggaagcatgagtataactttggctttttagtaattaatcactttgtgtcatcaaaacttatcttagaattatagggtcatggaattggcggggtaggggggacaatatggaatgattaattatctggatgctttcttaacaactctggccacttcacatcttgttcttctcgtggaatgtctgtgttgatgccatggtactttgaccaagtacggcaggtccaagcagctcaaagcgtggaatggcggtttgactccccgctggcacacccaagctgtgacactgcataggttcctgcaactcactaggggaatttactgcccacttgcagttgtgtcattttgccactagatggtacactgttggtccttttggcttttacccaaaggtgcctggctcatttggaggggacttgtaagaggcattccaaagacgtgccatcatgtactcaaccaaatcaggctctttacagcttagtttttaaataaatattaagtgttagaggtttttatgtaaaataaactctcaagttctcatctgattgtaatggcccatattatctctaaataaacagcagggactagactatgattttcaaagctttcagtgttccggtcaagctcaatttgtgtagtttcatggatgcgtcctcactgcccaggctctgagcacttaaggttgtagagacacaaccactgccgagccacttgggattcagatctggtcagcctcatgtcaggagagaggaatgaagattctcctcttcagatgaaaccttggggacttctccctcccatcttctgctggtcaaggttcttgggtggcagataaccagaaaccacctctggtgaactcaaactgaagagggatttattggcaagatcttgggtagttcacggagtttatggaaggttggagaactgcactcagaactggggcaggaattccaggaggctgagctggctgggatcagagccagaatcaggccctggaatagtctggataggacgttgctgctgttgccacaacaggggaggactggatgcagggcactgtccttggcactgctgccgttgctgcagttccttttcttcagtcagcccattcatcctcagcacttttaattttattttaaactatcccttgtttgttagtatcacctgctgcagatttaatcaccagagtgagaacacacaacagaacctgctactcaaaaagtcctcgtgtgcaagagctggtactcacctgtgcattgtcattgtcacgtactatcgtcatactagctcttaaaatatcaaagtagtctcttaacacccagggtccattctccttctaccctctcagcatccagccattaaatggttaatagcaggcacagggaggggcctcccagagagtgctacaactggtgtctgctccagttggtagacatttgtggcaaaatgatggttaaatattttgaagattatccctgactgtgtctattttaggttagtttgtaagtaagggggctgacacttagaagttagtagtttctatattgagaaatgtgaaatgtgcaaagggctacccgcatatgacggtgattacttatcatgtatgagttgaggtatcctttttgtttggttcacaagacatctccattcatttcttctccagcctaagaatgctgtgtgctttgtacttgttttttaaattaagacgaattaaactatacaaagggaattggtaaatggattatggagtgttattacaatgaaatacagccattaaaatgatggatatgctgactatatagaatcccagaaaaatgttcatgaaatacttgatttaaaaattagaacacaaagctgtccagatattatgtttacaataatgtacttgctatttatgtatctaaaggctagaaaaaacttataaaagaatgaaaatagtttcagttaagatagcttcacagtggaaacaaaaagatttcttcaataatgctttaaaaattgaggaaaggccaggtgcagtagctcacacctataatccctgcactttcagagactgaggcaggaggatcgcttgaggccaggagttgaggccagcctgggcaatagagagaccccatctccacaaaataaaaattttaaaaattagccaggtgtggtggtgcatgactggtcccagctacttgggaggctgaggtgggaggatcgcttgagcccaggaggttgaggctgcagtgagccgtgatcacaccagtgcactcaagcctgggtgatagtgcaagaccctgtctcaaaaacaaaaacaaaaataaaaataaaaataaggaataaaaaccttaatacaattgctcatgaaaattatttataaaataaaagcatttggatgctatcacaacaacacttttgatcctgggaggcaaactaaggtatcaaaaacttaggactggaaaacatgaggacatacagataacagcaggttgtgtgtttctcgattgaaagaacaaatgtttccacagcttagagaaccatctgtggggacagctattgaaggtcatagatagtctcagatgtatttgacagtgacagaggcaaagttcctgctgatttgggctgcagagatggactttgaatgatttcctcttcatccctagcattctactctcttaattacaaggacagtaaggcaaagcaaccatccagaaaggaaaccagtgtccaacttcagcttttttaaaagaaaaagctaaagcatgtctccttttgcagaccttcataccatatcttcatatccctattacagaattcgtgaaccggggtttttctctgtatcattgcttctcacaccttaaaatgcaaagggagcacctgggattttgttaaaatgcccattctgattcagtaggtacaggagtctgagcttctgcattttctttccttttattttttggagttggagtctcgctctgtcacccaggctggagtgcagtggcacacacgaacttggctcactgcaacttctgcctcccaggttcaagcaattctcctgcctcagcctcccgagtagctaggattacaggcacccaccaccacacccggctgctttttgtattttagtagagacagggtttcaccatgttggccagggtggtctcaaactcctgacctcaggtgatccgcccatcttggccttccaaagtgctggaattacaggtgtgactcaccacacccggccgcttctacgttttcagtaagctcccagctaatgtgaatgctgctggcctgtggaccacacttgaaatatcaaggttctacatatcccgaggacttgtttttcagattgtgtgaccttcagatgtgttcagtaagaccttattagtcgaggtatgtacaagacttgtactttgaaaaaactataaaacattaccaagagaaattaaagaagtcctggaaaaagggagagataggtcatactcatgaactggaagactcaatattgttaaaaatgttagttttccacagattgatctatagattcaacatgattccagtcaaaatctcaacagacttttttaggtagaaattgttaaggtggttttaaactttatatgaaaatgcaaaggatctaaaatagccaaaatgattttggaaaaaaactcaagttggaagactcactgtattaggccattcttgcacagctataaagaaataccagagactgggtcatttataaagaaaaggggtttaattggctcacagttctgtaagctaactgtacaggaagcatctgcttggcttctggggagcctcaggaagcttcccatcatggtggaaggcgaagggggagcaggcgtgtcacacgacaagagcataagtaagggtgcggggggggggtgccacatacttttaaatgaccaggtcttgtgagaactcgctattgcagagatagcaccaggccatgagatatccacccccatgatccaaacacctcccaccacgcccacctccaacatcggggattgcattttaatgtgagatttgggcagggacaaatatctaaactctatcactcatattacctgatttcaaggctatgtaaaactacagtaatcaagacagtgagttatcagataaagacagctcactgaaacagaaaagagtccagaaattgacccagccatatctaaccagttgcttttcagaagtgttatgctaaacgagagaagccagacacaaaggattacctgtactatgataccatttatataaaatcctggaaaaggtaaaacaatagtaacagaaagcagatcagtcgttaacagggacctgagatggtacttggctgtagagatacacatgggaactttttggggtgatggaaaggctgtatattgtgattgcggtggtggttataggatgtatatatttgtcaaaactcatcgaattgtacaattaaaatggatatttttggttatatgcaaactataactcaataaaagatctggatatatattagggcattgtcagtataatttcagctttctttgagaccctactaaattaaggggttatccatttgaacatcagggattggttcccacctccaggtggtagagcacagtgcataggaacttgggccagaaagtcaggctgtctgggttccagtatcagctcctccactgcagcaagcacacagcttcacctgtctgtgtctcggtttcctcatctgtgtaactaacctgacattagtggttacctcctagggttgtgagggtcaaatgcgttaatatattcaaagcatttagaacatttccttgtgcatagtaagctatatataagcattcagtatgatcagtaagttctcaaatcagtttgtgttgtgattttacctctttctcctaaaatgtgttttttcccctttcctttaccctctctttaaaccacgtgcactcgtgtagcttgaggtttttaatagaatgtttgaaagggatgtcggataacatcagcaccaaatatgggcaacaaaactgaaaccagtgaggttgagtgatgtgcccaaggtcacaataatatgtgggtgaccacaaaccagaagcctggccaggtgactcctggttcagctctgttttatcaagggttacagtgtttgcatttttaatactaaccattgggatttatcgcgaacctgccattcatcaattgcattgtgtggtgtttgtttttctacagagcagttcagagccccagttgcagacgacttgtcctgccaccaccatgagttctggtaagtcattttaaactcatctttctcttatctaccaaactgggcagtttacccagatttcccacgcaccctgaaggccccactctggcattttattttttattttttgccacctgggtgaatgccaaagctttgtcataagttgtcatcatcactctcatcaccttcatggttaatgattttttgagtgcctactactattgccaaagaactgtgctatacactttacatgcacattagccctctctttattgagatgtaactggcatactataaaccacagatatttttagtatacaatttgataaaatttgacatatgtgttacaccttcatggcatttcttaatctgggtgactgcagcaaaagtaaactgattggccataattgcccaaggatgtgaactaatctaatgcttccttcatctaggctagtagagtagtttgctccctcttttgctttgcctttggtagtaaaagtcaagacctaaagaaataatcagttttgagtatttttagttttgagctgaggtagaaaacgtgggttagggaagacagagatgggaacagatccctgctcatcatgcagctaagagctgtcagctttccaacccagaattggagcagagaagtttccatctggagattcagccccacctaggctactgagcatgccctggaccctcctgagacctgcaggtggggcaggctgtggggtgggaagatgatcatgtggatatctcattccggagtctcccaatcctgccgtatttcgtgagtgttgtcagtgacctctgtggattaaaaatcacccttttccatttatttgcatacaatgccgttttaggcaagttctgagtaggacagtatgtagttcagacctaggaaggctctgggctggaatagctgaggcccacaccctgacctcagtgtttactggctgcatagccttgggcctgtggtggacccttctcctctgcaaaatggacataataaaaacaccagttcattgggatttagtgaggattaagtgaggcaatgcttttatttatttatttttgagacagagtctcgatctgtcacccaagctagagtgcagtggcgtgatcttggctcactccaatctctgcctcctgagttcaagtgattctcctgcctcagcctcccgagtagctgagattacaggtgcccatcaccacgcctggctaatatttttgtatttttaatagagacggggtttcaccatgttgaccatgttgaccaggtctcgaactcctgacctcaggtgatccgcccctctccgccaccgtgcctagctagcctaaggcagtgcttttaaagtgctgagctctgtgtccaaggcatagcaagtgcttcatctttgggctcttactgttatgagctgagttcctccctgcaaagccagggacttggcttctcagcaattccttgagtgcttttgctgtgtgcgaagaggccgtgcaccttttcccctctaagcaggctcgggtactgccagtagctcctgcttcgtaactcattttttgttgtctccttggctttttgcttttgttgtcatttaaaataggccatgatgttttgctttattttgtttttaactttttctctgtagcctaaagctactttctcgtccagtggcagaactggcctcactttgctttactactcttggcatcaagggccagagaaggaggaagggaggggcctggaagaagggtatgggtgtggaaaagcccaggagactgctccccagaatctctctctcaggtggggggttggaaggaggcgttgcctaggaagagttcagaaattctggagcctttgacctgatgatcccactcttgggaatttctatcttaattccaaggaaacaaaaatatcacctacatgaagggggggtatgagtaagtacgttatgtgtatttacttgatggaatattatgccgctgttaaaatggtcattaggagaaaagcagctacatgggaaatatttgttttaatcactggtggaaagagcagtgtaaaaatggtggattcttttaattccaagtttgggctgggctaccagtcactgggggaagtgctttacctgtgtgatattgttacattctcctggaaaaccctcacaggtggggcgtggtttgccaccctcattacacagatggaaaaactgaggccctgaggggttaataatatggctgggatcactcagctagtgtgtactgttgctgaatcaaactcaggaagctggacagcaacattgtgctgcagaggtttgagtttcaggagatggagttactaatttttaaatacctttccaaaatttcttcaagtttggttgttacatttaattaaaagaaaggaagaacatggggctgggcctgctggtagctcagaggctgccccacactagcctggggaggcctggagcaaggcctacagtcacagaaggaactagagcaggtacttggatttctggccttctcaccagcacccttcttccacccatctcagaaatcagagctcaagggagactcagacatctaggagaattagccttcacctataggtgggtgtgggcaattaacaggtcacagcctgtggggccagcatgcggaagcccaggcaccaggtggggcagtggccctgctcatgtgtggcccacaggcagcatccagactggcctgtcagtgtggtttatagcaggcgaccccccttttggaaggctgattgttaagggcctaggtaaggtgacttagtctcagcctaatgaattacaggggtgtgggactaagcttcagtcccagcatttggagaaatagaatatatatatgtatcaggaaacccaaatgtttatcccatttggggaggaagaagatgagctgtgagatgggcagaccagagttcaaatttcagcctagtgatcttgggcaggcctggaatcctctctgcctcagttttcttatctataaaataggcattcctaactcctagttctggaggtctgggtcttcaggataaaatgaggtgctaattatggaatgctaagcatggatcctcacaccaggcaagtcagtgtttaaaaacccatagctagtcatgattatgtttgtagcttggttaactctgggcttggaggggttcctccaagcacacatgtcccagggcgacagggcctgccggccttccttccttggcgtgcctttatctattttgggatggggacctgggcggggcttaggctacaggggagcagggaggatcttagcttctgtaactgagcagaactcaggaaagtctcagccaacacagaggacatgacatccgaggggagctccagggatgcgtggaatttccatcaggtgagaagggaggaggaggcattctcggcagagggcctcataggaaccaaggcctagaggtctgaaagtatctgggcaggacccctctgcttcctcctgattgtgaccccagcacctcctgccacacaggactcagtaagtgctggggcagcttactcacaaacctcatgctctctttctttcttgcagaatgtgatggtggttccaaagctgtgatgaatggcttggcacctggcagcaatgggcaagacaaaggtaaggttcttggagagaaatctggattggtactggaaggcatttctaaaggtgcggagtatgtcaggccggggccatcccatctgcctggtgcaaacatcattggcctaaccaagccataaactggtgacctgttccctacactgattttctgagacctggagcctgttgttgcatttcgggagtctgaggctgccattttcccactgtgaggtattaaaaactttccctagctcacaaggatgctgtgaatgacagatcagatacgaggaccaaggcgtatttcatgcctggtacagatggcatttatcagcctgaaatatcccttgctcagccttttaccttcacctgtaataaacagtgatgtgttcacagtcctgtccctaaggcaagagcctaaatcattaaaataaattatttcagtggcattaatttaatgcacatcctctcatagtttcagtttttaaaatttttaggataaaagatttaaatgtgaaatgaatgatggatgcgatgacctttgaggtcctgcttagcctggagactttcatcctgacctcagtgtggctgcacagatagcctggctacggggctcgcggtgccacttttattgtgttgtgtgatggatgctgaagctggagtgacaaggcatgggttcaagtcccagctctgccactcatgaacaggacatcttgagaggccctttatctttgtgggtgtgggttcccttatctataagatgagggaatttatgatctgccgtatttatttctgcttcaaattcagaattggaatgaacgctcatcccagtaaattttctggtaaccaagaggaagggccagaatccttgcattgggcatttaagtcaagatgcatctcaaagaataattccaaacaatttggcattttgatctttgtaatttccatctgggtcaacaaagtgttccttttaagacaaggcaaagtgtgaaaggaaccagccgtagagggtatgtccagagactaggaggggctggggtacagggcccaggtggtgtgggggtgggttccttggtggccagaggggacctgccatgctcctgttcttgcctccctgcctggtcgcccctctgcacccacggtgtggggccctggacagtctcgaccaagttgcacttagggaactctgaggggcagtgcctgtggagtggctgtaggcatgtgtttagcatccagtgaggagcatggggaggggtgggggccctattagtttaaagcctgtggggtcatggaccccatccatgtgaactcatttatacaagagacttaaggcgtgtgggggagggtggcaggtggagtgagtcccactctctccttggtgagactcacctttgtctgcaaacaagcaggcaggagtgactgaagggcatcagggtggcctgaggtcactgaaccagagctgggatagctgagctccagtctcagcctctccgcttgagaactgaatgagcctgagcagttcactgagcctcttgcttcttcctctgaaaatggttacaaaagtctcccccaagcccatctcccaggtggagcagacaggaggatgctgtgagagcacatttgtgtcttaatccatgcagcagcgtcattggcaacctagtcattgatggccaggcgccgtgtgactgccccatgccttatgaggtgagctgacagcgggatggactggaaggtgcactgtctctggccgacatgcctcccttctgttgccttgacaggctcaccagcacgatgctgactttgcagtggcggtcttgttcccagacagccctacccgctgtgtttctgtagatctgtggccacagtcgactctggcaccttcacacagagctcccatccctctttatgtgctgcccttgaaagagaggacgaggggaggcctcacaacaggctcggtgtgaggagagttagggaacgtgcctaccatgagattacagaatctgggcaggcagggagcccagagaccctgcagatagataagtttgagcacccaggatgttcgagcggtagccttcaccacgtcccaggcaggcattcctgctctgccttagctcagctgggcattggggtcctgggctgtgcacttgggtgctgcccagagactacatatgcacttggacacttggcacctcctgaccaggaaagggtgggtttgagcaaggccatctgccgtttaacagatgggggctttgatttgcttggggccagagggctacaattatcggagcaggcacaagaccccggaagttatgctatgggggaagtagctctgatggctgaagggaccagacaactcacgatcttgttccttcgttcttccactcatctggagcccatgggccacagccctcctcctcggaacccactccccagccttctcccaagaggccctgtggaccctgagtgctctccccttcttctgtttgccaggccatctgtgtgcctctgtaaatctttgtccagagctttggcaagctcctggtgtggtaggaggcaccggtcaacactgaccagctgtatttgggtgatagttagaggggaggggtctgttgtcttggcctagaactctaaagagagaaagcaggttatttttaattactgcatctactgccctttgtattgttcttgttgtgtgggcgacttcctcctattgtccctgcccagttcctcaactgcctgagtgtttcccaaatgttctttctggatgcaccatttacccttttgtgttttcagcaactgccgaccctttacgcgcacgctctatttctgctgttaaaatcattcctgtgaagacagtgaaaaacgcctcaggcctagttctccctacaggtatctccttgggtcggtcgattttctctaactgtgagcggatcatggcatggttttcctttcttcttttcttctaacacgcactttgagctgaatcgttgcatgtttaggaggcattccgtctcacttcctcagcttgcttccttacttcctctgtgtatgtgaatgtctgtgtgcgttttcctgagagccagcgaatgtggggaggaactgaggacagaggccttgcccctcttttctttaggagaagggtcagtccagaggctcagctttccctttgggatgggtctgcggtgcatggacatcctaggctctccctagaggtttccagcccccagtactttagcaaaaactgcagtctccctgagaattaacctggtctcacagagaacctctgaacttagctgaatttgaagcagctgcccttaggtgcccaacctagattcgcctctgatgctcaccgggccatcccagagcatcccctttgccttccccagttttacctgcagccacttcctgcctctcccctccagagggtgggggagtacagttcagatgtcagctctggctcatcgcttccttctgtacaaagtggggacacatgaggcctacacagtactttatccaatggcgctttcagaagtaactgggctgtgtgtccaggaacctatggatgggctgcatccatcagtgtgcctctcatccttttgaagtgactatgaaccagttttcccaatagtttggtgacatcagtcgcttagcctcttgatagagttggataagtcagatgctctccaaggctgatgcttgccctgacacattgtgcgtttcgtgcattgcgttcaatacaagaggtgctgacgaggcaggtccattctcttgtctaacgctaatgatcattctccctgagttgttggcagggggctgctggcgtggaaggaaaggaaagaagaggctttgcttctctctgccctcggaggggaatggggatgagctggatgtttgaactcacatcctgcccagacacacaccctgaatgtcaacctgtaatcctaactgtgacaattttaggtcagggatctaggctgtgagcaatttgaaaacaaaacaaaactgtggcgttctgcatagctcagctgcacataaagaaacactctgcgtgtgcctcccagaactgtgtggtctgccctggttccctgcctccgtgactgatttcctgcaggatggcattcagatcttttgaagcgtattttgaaatctttctcaaggaaactctaaaagttgacctgggtctgttattaggccctagtgaaactgtaggagacgccaggaccctgtgaagacagctgaggctcggtggacactgctcattgaaggatttagccttctgagtcgtttttgttgctgtgagttttctttgttatgtttggaaagtgagactgtcactcgtgagctttctcgccaggcagcatatccttctgtctcagcattttgggagtcttgacttgctgatccaaggagatttgcttttccttttcccactggaaaactgcaaaggggtagttgttctccatgggaccacccgcccccaccccccccaccgcccccacttccgtagttgccagcctggtcttcaatgagaagtatggtctggaagcttgaaacatctttcataaactctttcttgaactgtgccttactaactggtcagaagtctgctcatcaacctaaacttcatttaataaaaggaataaacctgctttcattttgaaatgttttcagctgatagtataactcatccatttactcagaactcaccattgccgccatgttcccctaacttcatgatgcacagtaaacctctgaaaacttgcccctctccaccacccacagattaatttcattgaccacaggtgttcaaagacttcgcatggctgtaaccaggttcatctcattccccggctgtaacaatttgctaaccaactgtcctttaatccttcaggagtcttggattcagtcttcaattttggaccttttcttttcagacatggatcttacaaaaatctgcactgggaagggagcggtgactctccgggcctcgtcttcctacagggaaaccccaagcagtagccctgcgagccctcaggaaacccggcaacacgaaagcaaaccaggtgcgcggaagctagggaaagctgttcaaagccacgtgggaagggcgggaggaggctctggtgtttttgctcaggagggtgtgagttcatcagatacctcttggggggggggggtgtgtgtgtgtgtgtgtgtgtctcttacggtcccctgggacagtcaaatcatttggatgggtagtggtcaaagcctcaaactgacagtcacatgctgcagatgaaggcacagcaataaccacactttatgttagctttgactgagcaggtcatcctgtgaccacagccagtgctctgcagactgctctcatgcagactgaaatagcttagggcatggggggtaagtaagcggtgcgatgggctagaggttgggcttctcagagctcatccctgcttcctagaggttcactgtgacctgtccaggctgggctggaggtgcagccaggggagactgagaagtgtggatgactcaatgatcttgctcctggaaaagcagaggtggggagggctcaggcctgggattggccactagccagctgcgggagcaggatcaggaaagtagctcaaaggcccagtgtaaactaggagcaaagggagatcaaagaagccacatgaagcccatctccccaccttaacccatcacttgggaaacctgaggtattgaggtttagaactgggacttcagaaccgggtagatctctgtgcacaccctgtccccaccacctgtcagctgtgcaactttggtcgagttattcactgtctctcaaccctgatgaactgtagaatggggttgataattgcatctgcctcaggattattgtgaggaagaagtgtatgaagtgctgtgtatcatgcctggtggcatggaatagactgttagatgttagctgctatttgattatgattagattattttggcctctccagggacgactttgcacagcccaagtattctggtagttggcaaatgctgactttgagatcaggcacagttagtttagggtgagacagcacctctccactctgtagggcagtgactttcacactttagctgcatcagaatcacttggagtaaaaaggtaggttgctgggccccagcctggagttttagaatgtagggttcccacttgcaggtctgaggtagggtctgaaggttcacatttctgacaggttcatgctgatgctgctagtgcaaggactgcatctgagagctgctgctgtaggggatgggagcttgctttcttgaaggaaagggagggagaaatggaatggaggggaggaccattcccttgggaccagagaggctaggcagtagggtatgcagacccctctggtgcagcgggagtggtgtgttgtgataagacagatatgatatgtaggatggaaatggccagacctagcatcctggaaactgattttcttccttcccagctacccataacaggtgccagggcacatgctggtggatgaggccaggctagggtttgagcacaaacccctttctggtgatgttggtccccgtgagggcttctttgtccttaggctgagggcaggcccgagcagcccacagccctaaaagtcaacagagtagcttcttggtcctgcatccctgagcccagccctgactcctgacccgctggaaaggtgggggtgaggagagaaggcaaagttattttattctaaggctaacctcatccagcctctccaagcctaactgggacgacccacttccaagctagagagcatttggagaagagagaatcctaagggatgatgcaaagagaaaggctttaatgtgcagtcccctggcccagtcaaataaccttacaaaccaactgtcccgtcctctggcagcaaatggaggtggtggagagggagcttggagctccctctagtggttacagtgtggcattgacgtagaacacaatgcccaccaggtgtacgcctgtgctaccagtaccgtgtgtggatttgtttttttttctgtttcgttttctttttttgagacagggtttactctgttgcccagcttggagtacagtgatgtaatcatggtttgctgcagcctcggcctcccgggctcaatctgtcctcccacctcagcctcccaagtagctgaggtgcacgtcaccacacttggctaatttttgtattttttgtagagacaaagtttctccatgttgcccaggttgatgttgaacttgtaggctcaagtgatccacctgcctcggcctggcaaagtgctgggattacaggtgtaagccaccatgcccggccccgtgtgtggatttgaggcacttttggaaacactctcttgtcccagaatacttttgtgtcttacaaatttctaccagctaatttggtgaaaagaaatttcaccacatctttttcaccaaaccatcagcagattgttttaaaatgcaaatactgtactcggaagaattaagggatagttatcagtcattcacaccttacagtaagttcatctttgtaaattgagatcatcgaatccaaataagcatacattcattcagcattatctatgtgccaggtgctgcatgagtcacttggaattgtgatgagaaaggaggaaaagagagcaattctaggtgcattaggtgagggcaaaaggcagtatgttgcaacaggagtcaggtgtggacttgtagtcagccatcttcctttcgggctgtgggtaagtcctagtgactttgagcccatatcaagtatgaggaacttgggccagatgctttccaagcctttctagctccagaatgctctgcgaccttaggaagtttggaaattagcctaacaaatggaatccctttgattggtgataaatttaagatggtacaggagggcagtttggatgaaaaggaacaagctgggtttgagtagaggaaacaaagaaaaaatccacgtgctcattaagtatacaacgcagactagaataagttaacactggggagtgggcttaaaagaggatgtcagtaagccgggcgcagtggctcacacctgtaatcccagcgctttgggaggccgaggtgggcagatcagttggggccagaagttcgagaccagcctggccaacatggtgaaaccccgtctctactaaaaatacaaaaatcagccaagcatggtgttgcacgcctgtaatcccagctactcgggaggctgaggcaggagaattgcttgaacccgggaggtgaaagttgcagtgagtgagatcatgccactgcattccagcatggaagacagagcaagattccatctcaaaaagaaaaaaaaaatgaggatgtgagtataggtaattcagaaatggtaatcttgtccccttaccatgctacctattggctaacatcctgctggctcttgactctgacagtgtccatgtcaccctccggactgacaacttgctggcccataccagtctattgtcctatcctggggcctaggagcccctgggccttccctggcttcataaaaacagttttcagcagtatttgcagacagccaagcccagtctggactgggagcccaagtgtgaggtagtggatggctcttgccaaggattgcttcctactcccaatgcctttgcagatagctaatgtcagatggcgtctggctccctcccttctcaccagggacagcatttgtcccccagctgctctgcctgcttcctctctgacttgctccctgtttgccaccttcttcaatgcctataggtgtccaggttgttgattatttgcctggactggaaggtccagtccctacctggtcccctgatacccacatttcagcagtgccccctatttctagtccttgtcccaaccccctcacctgggagagatgatatagttctggtttcacacagttctctactgaggctgagcactgccacttactgtctttgcggtatggacaaattactccaccttacagggcttcagttgccttatttgtaaattggagatgaccataacagagttgttgagattaaatgagctctttcttcttcttctttttttttttttttttttttgagatggagtctcactctgtcacccaggctggagtacagtggtatgatctcggctcgctgcaacctctgcctcctgagttcaagcaattctcttgcctcagcctcccaagtagctgggactataggtgtctgccaccacattcggctaattttttttgtatttttagtagagaccaggtttcactgtgttggccaggctggtcttgaactcctgacctcatgatccacccgccttggcctcccaaagtgctgggattacaggcatgagccaccacacccagctaaatgagctctttcatgtcaagcatttggcacaggcccaaagcaagtgctttttaagagtaaccattctagttcctgcaggtcaagaggcttgttaaagatttgaaagaatttcagtttgaagccatgagggcctcacccctagcatggtggcaatgggagtgaagagcagaggctgaggtcaaagtgtcttttggagaatgaaatgaccagggctccttgtggtgtatttaaggaccacagagaggtaagactccatgtggcccaggagatgccttccctggttggctaggagagtaattgtggcactcatggagttggggggatttgtgaagagtgctggaaagaatgttgaattccatcttttgacatgtcaagtttcttggcaagggaaggacttccaggagaatgtttctaatgggaatttggaaatttggagtccaatgtgtggatttggaagccatctgcatccacatgaactttgagagaatggagacattctcggtggagtgacagagagagcccttgaaattgcccagttaacactcattctccagactcctccattcaagtggtggcttaactcaagatccctgaccacagcttcccgatcagcctcctcatctctgaatgtggaccttggtttttggatcagaaccatctgaaaggaatggcagtaatcttagtaccgactccctgcccccaggagaaacctcatcaccttatccctgcctcctgacctcattgccacaccaggtctgagcgttggccatgttggttcagagtgacttgatcatgtcccaggtcagggtgttttcactccagacagggagcctgagttggtggtgagtgtgatacaaagctttctgtctggtatagtctaaagatcttgtggcttgatatatcaattcctgtgttctgacttagatgccagggtccagttcagcccttatattttgttaattctgtaccagttggctccagtccttactgcctgattcttgaatgcaaagttagctttggacataaagattcttggacctgcagtccaattatttcctctggttttgactctcacatttgctctccaggaatggcagtagcaaaaaggtaccataagaaggttaacattgaagcagttgaaggtaccccgtacctccattaaattagagtctttttgatgagtacatgtgtgagaattagggccaactgagaagttggagggaaaagtcctcacaagagtgcaccctcccttctgacaccagctgcaagttcaggggattcacaaaaccactctcaggtttggtacaatgctggagggactcacacaacttactgaaagctgctacactccgggttatggtttattgtagggaaaggatacagattaaaaaaggcaagagaagatgcacgtaggctggagtctggaaaaggtaccaaatgcggagcttctgttgcctactctgcgtggagagtcaggacatattatttcccagcagtgatgtgtgacagtgttctcagagcattttcaaccaggaaatgtacctgagcctttgtgttcagcctttttgccatgtctccattacataggcatgatccactgcccacagggcagttctcaatctccagtccaactttgtaatcgattgagctcctggtggctcaaagcccccaccccaagtcacataattggtgtgactcaaagccccagataaacaaagtcactcctatcaggcatgactttccaagagctcagagattacatcccagaagctgagggccaaggccagacctctttttggataaagttaaattctctactgtacagtgtgaatacaaaataaacacaaataagatttggaacacccttagacttactattaacacctgtcatctacctcttaaatactcttaccagaacacatcaagactcactcagtgaaaattatcctaagatgccaagaagaattgactgatcagcaaaaggctttaaaacaggtcaaaatgaaattagcatagaatgagatgagataaaataaaatatcaggaggctacagccacaggccagaaaagattgcaaataaagaacagctggaggaaaagataaggcaaagtaaattatgctgcttgcagaaagggtaggtctctcaggactgcaaaagctctctaggatccaactttccgaggcactccccccagcttgggagctctaaggtaacatttattgaaagaagcattttgacagtctcttcaatcaggagttaataatggatgatcatgtgtgcaaaatttcatacttctgcacataggcacaaatggccctgggctgctaccaaccttccaagttcagaagatgaggtaatagatgaaggatgataagatgtcagaaatatagctctcctttaacaaggaagagaggaacatttaagaggtcctgagaactgcctttttgggataggggaaggggaacagttttaaagacttggaatgagaagaaaaagtggatctatccctaaggatcttacgttcttaaagctatttatcacatggcagagatcaacaatgctcatttttttccatggttttttcccccttatgctttgaattctgattttgcaaagcacatgctttatgccaaatactttcatttagtcctcttgattcaaaagaggtagatattatctccatttcacagacgtggccaggtcatttgccacaggatatgcagttagcaagatagagactcagggctgaaactaggcaatctgatgtcacagtgatggtcccttcatgatacctggagatttagaagaacagttcacatttcagctttccgtgacatagctgtttgctagtgtcacttgaatagaaccaacccaactgagaaccagaaagtgggcaaaataatgtgtccccaattgcatgtacgaagtttacatccttcactagatagcccttcactcagaacctgttgacgttagtatatgcataaatctaataaatttgatagacttatttgacaaaggtggactagaaatagcaacttagtaaagaagatggaacggtaaaagtgatagctgtgagggaagaagtggaccattgtcatggcatgtcaccaggtgtttaagggcctgccaggtgtgaggggagctctgagccagggagccgtctggatgcgacagggagtgtggtgcactcagaggtattttcatgtacctgatctttgattctcaaagattctccaattcttcaattggagagaatcaaagaatcatactccctgtgaggagtatggggtaaggcttatattttataggtgagaaaagtaaaatttagcatggctagtgaacttgctcctggtcatacaagccggtacattgcagtaatgtgagcaaaacacatgtcctgtatgtacctttcccaactacagttgtccctcagtatctgccagtgattggttccaggaccttcacggataccaaaatctgaggatgctcaagtcccttatataaaatggcattgtatttgtacataacctatgcagatctcctgtatattttaaataatctctagattacttgtaatacctaatataagtgctatgtaaatagttgttactctgtattttttaaatgttgtattattattgttttcttattttgtgttttttcccccaatatttgatccacggttggttgaattaacagatgcggaatccgtggatatggagggctgaccgcacgcagtttttgcgggttggagaagacaaatggcagtgaattgtctgtaaggaagtggcagaaatgtaacaggcaacctgctaaaagaatatgtagctaaattttaaaactgttttaaaggggaaaaaataaaatggatacagctagttttccagaataaggacgtttttgagtgtacctctcatcagtggttctccaggtgtcggttacggactggcagtctcagcatcacctgcaaacttgttagaaatgcagattcttgggcctcacctcatacttactgcatcagaagtgccaggatccaggcccagccacctgtgtttcagcaagccctgatgcagctacaccactgctatacgtgaatgccaatcacttggaacctttaccctaccttgccttctgctccagctctttttggctcccaccacctctctgaagcatagcatccacttcatggccgatggggaggctggtggctgtgggggtggtaggcagagtgctaggtttggattctggagacttgggctgactgctttgtcacttcctggctgtgcgactttgggcaagtcatttggcctctctgtttcctcatccatgaaggagagtgattacctacttcacagagttgttgtgtacactgaactaaaactaaatgggcgtaacagtgactcacagtggcacttagagaggtgttcagtaaatgtctgtaaatctcaacttggcatctggaaagcccatgtctagcacctgagggacccacattgaaacggaggattgggcagtgagactgcagtgttagtccctctttctctacatggtgaggcaagaggaggcagcctgggaaaagaaggggttaaggcttggctagattagggattggcaaactgtggctgtgagcggaatctggcctgtgcctttttttgtacagccctcgagctaagaagggcttttacattttttaatggttgaaagaaaaatcaaaagaagaatggtattgtatgccacatgaaaattttatgaaattcagattttagtgtccataaataaaggtttattggaacacagccatgctcattcatttacatatcatctgtggctgcctttgtcctacaatagcagagccaagtagttgcatctgagaccatatggcccataaaacctaaaatatttactatctggccctctatagaaaaaagtctgtggacccctgggttagatcaaggacagagagtagagacaagagatgatacagaagatgataaatagcaaacattttctgagctttgccaggcactgtggtaggcattttgcatgcataaatgttcttattaacaacacttataaaacaggcatatcattatctccatttttcagatgggcaaactgaggcttataacttgcccagggtcatagaacccttaggtggtagacccaggatatgaattgaggcccagctgcctttccagtcgggcttgtaaccactgcactctgctgcctcatggtgctatgtgctatgtggatcagactagaggtttagggtctctgaaatgcatcaggcagtggctgggaaggctgaagggagacaggggtgctttgtgatgtgatgaacactcaggaagggtgattagattttgaaatgtttatgtgcctcatttaatggaaagaagaaaagcaggcagggaggaaaaaaaagtctttatcgcagcagatacctcccagcttaagtcatgtgctgccccttagcccagcaccagcacccctggaaaaagtgtttatccacttctctctctcctgggcctgttagttggttgggagtggtcattctgagcccacagcaggctcaaggaaggggaatgagagtcagtgagtagggactggacagtagagaattctgttgcctttttgtctgtaaaataagaatgtcaagtaacaattgtttcttcatccctgtgaatgtgagccttgtgttttcaaaggtcagtgcctgtgagcacatcatggtttcgagtgggttcctatggtaatcaggccatcgtgactgagggcattttgtgtcaaacaacggggtgctggattttcaaccttctatgcagtttcatgcttgtttcctgcaaatgtaaccatttctgtttttccccttttcttgttttcatcctttctgcaccacgtgtaggtctggagccagagccttcttcagcaggtatggcttctcttgcattctcacctttctggccttctaccaaggaccccggagttacaggggaaccagggagttattccctgtgagtgagagattttttcctctctatttctcagatgagtggaggctttcttccagtgctgatgccaatggaaatgcccagccctcttcactcgctgccaagggctacagaagtgtgcatcccaaccttccttctgacaagtcccaggtaggcatgtgcccaagggcagggtggggactggtgagtggtacctgttcttgagtctcttaacttagactggtgacttcctgcttccccagttggataacggaataggtttcaagcttttggacaactctggataagctctgcaaggacctagctaagggaaagttggggtcaaggggagcagaggcatggaatgaggttggtctgtaccagggtgttggaaataggccttgatgcctatttaggtttgttctgtatgtagaagtgttctgaaagagggaattcatttagccttggatatgtaggaaaaaggtctgagacgtttttaaaaaaaattctttagagtgtaatattcaagagaagaatgcatcttgtgtttattccagttgttttctggagatggggctgtaagaactccagcaacagtatccttacagattaagatcaggtagctgtggccagaccctaagtccagcagcccaggaacaggcaaaatggcagtacagcccagctgtatcctacaaaagaaatcccccaaagctgtacaaattggagtaaggatacttttgcttaagtctttccccctaggtggctttcctgatcttttctttcttccctctcctgttgttactttgtcattttgatgatgggaatagaccatgttttaatttaggtgatctgtgatgaacatttttgcatacaggagccacatctgtggagtcgactactacttctctctctctctccccctctctctcccctctctctctttctctcttcctctctctttttttaagacagggtctctatctgttgcccaggccagagtgcaatggtgtcatcgtagcccactgaagcctccaacggctggcctcaagccattctcccaccttggcttcccaaagtgttgggattataggtgtgagacaccacacctagcctagtcctttctcttaaaggaagctgtgctgctcaaaaactatagcagaaatgtgttccttgtgtggtccgcttccctgtgccttccttctgtgaaggtgttccccgaactcacaaggagtccgcaaattctgcaggtccttcctagttcccaccccacttctccaatgatcctctggttcctgttgtgaggatgtaaaaatgcacttgctgctgaaatgaagctgaatcagagatgatgtttttctccctctctacagatgcttatcctcctcagcgtggaattggttgcttaattgtctgccttgtatgctgagcaacaaacacatttagcctttctgccacctgctatgacttgcctccctaggtacagccgtatgcatcctgggtcactggttagaaccaggagctgcgaatgagcctggctttttgaagtcttcattagacagagggactggggaggtcacttgtccggtaaatgacttgccatggttttcccgtccctaaaccctttcacagtgtataaatgtgctgcctgtggcagacatacttcttttcaaccatctcaagaatggatgccatcagctctatgcagatcaagaaacagtgctgattaattcaaagcaaatgtagaagcatgtcctcttccactatcagtgacttagttcaaagggtaactcagtaattctttttggcttcttaagcagctcttttgaaaagacaattttaaaagcatgtgaagtaaataaaaattcttttaaaatttatttaacacagctttattgagcatctccgtggtgttcagatcactgtgtgaaacattgccctcaagaggtttataagggtgaacaccctataatatcttttacaaagtatgttttcttatctgtcactatccaagaattttctttctactggggttcccttttaagggaacttggtaaattgctcataaagaggttttatcctttatattcaatgtaaaatcagccattcaaatttcaggaacctttaggtcatgcattacctcttaggtgtgttttctgaatggaaacatgacttcttgtctatatagtgattgccagagctgtaagtatgcactggcttagaggagggaattggtagtttatagaactgtataaactataaacataccaggattttccagaagcctcatattttcactgacccaccttctgaaaagataaatagaatttcatttatagccaactgggcagaatgcagactgcctgtgtggttcctacaatgtttacaacaaaaagtagttccctgcatgtaaagtcactgtgcctatcccctttcttcttcaggactaaaagaagccccagggcaggagacctttggatctgagtgcactgttgatgctctggggaagcgtcctctctacagggtcaaagccctgggaaggctcatgcctgatgtaatgcaccatatatggcgagagccaaaataagttagaaactcactgaagctgatttctatctttggacaagaagaaatcacatatgggacatttgagctgaaagtaaaagtaaatctgagctcaaatcaaaatgatcttttgcttacctccctactgccattatcagcatacccgccagtccctttggtgcgtgctagcccacgtgttttgtttctagaatcgtttagtctgtaaacatgttcactgaaaccaagtgagttcacctgaaagcttttgctgttgctgaatactagagaggggctattcattttgttttttttttggctggtgcatattcactggcactgccatgggtgccctgtggaaaggataggcattgaattagtcaaggatatccaaatgagctgcttgtccaatgagcttatatgtgtgccttgaaaactgagtttaaggaataggttatttactatttctgggttgatgttctaatctggactcaaaaaactttttttttttttttgacagtcttgctctgtcacctaggctggagtgcagaggtgccatcacagcttactgcagccttgacctcctgggctcaagcaatcttcccttctcagcctccttagtagctggggctacaggtgtgtgccaccacacctggctatttcttttttaaattttttgtagagacagagtctcgctgtattgcccaggctggtctcagactcaagtggtccttctgccttggtcttccaaagtgctgggattacaggcttaaaccacagtgcccaacctataaaacttttaaatatttttcacctattcaccctttctaacattctttcttcttgccacctgtatgccacaaatataagaatgaaataggccaggtgcagtggctcatgcctgtaatcccagcactttgggaggctgaggtgggtggatcgcctgaggtcaggagttcgagaccagtctggccaacatggtgaaaccctgtctttacttaaaaaaaatacaaaaattagccaggtgtgatggcaggcacctatgtataatcctagctactcagtaggctgaggcaggagaatagcttgaacctgggaggcggaggttgcagtgagccaagattgtgccattgcactccagctggggtgacaagagcgagacttagtctcaaaaaaaaaagaatgaaataaaattggccgggcgctgtggctgacgcctgtaatcccagcactttgggaggccaaggcgggcagatcacttgaggtcaggagttcaagaccagcctggccaacatggtgaaaactcgtctctactaaaaatacaaaaattagccgggtgtggtggcacaggcctatagtctcggctactcaggaggctgaggcaggagaattgcttgaacctgggagacggaggttgcagtgagccaaggtcacaccactgcactctagcctgcgcaacagggtgagactgcatctcgggaaaaaaaaaaaaaaagaatgaaataaaattaaaaataaattcaaaatagacccagatcttgcaccctccccatttttggtcaaaattcacttaccgatattgatcagactctaatatacttcacttgcgtaatttggaggaaagttctggttttcttctagaactgggatatctttaaaaataggagccattcacgcctgtaatcccagcactttgagaggccgaggcaggtggatcacaaggtcaggagctcaagaccatcctggccagcatggtgaaaccccgtctctactaaaaatacaaaaaattagctgggtgtggtgacatgggcttgtcccagctactcaggaggctgaggcaggagaattgcttgaacctgggaggcggaggttgtagtgagcctagattgtgccactgcactccagcctgggtgacagagtgggactatgtctcaaaaaaaaaaaaaaaaaggagccattaaagaaaacctaggctgggtgcagtggctcactcctgtaatcccagcactttgggaggctgaggtgggcagattatgaggtcaggagattgagaccatcctggctaacacggtgaaaccccgtctgtactaaaaatacaaaaaattagccaggcatggtggcatgtgcctatagtctcagctacttgggaggctgaggcaggagaatcacttgaacccaggaggcggaggttgcaatgagccgagatcgcgccactgcagtcccgcctgggtgacagagcgagattccatctcgaaacaaaataaaacaaaacaaaagaaaagaaaatctagcaaaatgcagtttcctcatctcatagtctaattcccagttgagccgcagattgccagatgactcttgttgacatgaggatcagactggagggtcatcccatttcctgaccctcttctccactgagacccaaagaggagcagtgttgagaagagagggatgctgtgtgagcctctggacctgcaaccagagctttgggcttaagctgtgaatctgaggctgatcatttacctctggggctgattccctttgtgtggtggtgggctgggtgagatgggcatggggctagattttgagaaactaggcacagtccaatccggtagaggccaattcagtccttcattgcctggtccccttttttgtgtacatcaaaaatgggagactgtgtgcttttaatctcatgcttgtcttccttctaataattagcttcatcaaattctttcctctgagaaaagagcacatgtgtattcaaaaatccttagcattctcttcttagggcacgttaatttgttatgcttatggaattgagtgctaaatctcagtgactcaattaagacatctgtctcctgtgaacacaaataaggacggttcttccagttctccttttcctaaaggaaaagaatgaaaggcactcaaaagagttccagtgaacataaacttctaaggccaaaggctcgaagataaatcttgagggaaggaggtttgagagggagttgggggctttggtgcttctcccactggtgtttagttcacttggctcccttcttgagtcaggatgtctaataaagatgcagtcagccaaggattggtgtcacaattgatgtagcatgtggcctgctacgggctgggctcagcctctctggatacaaaggagagtcaggcctacctctccaggtgagtgggattcagtctttggcttcacttagaattgtggatactaggaggagtctaacctgaggatgtgctgaaaaacgtgttaagaattgtttttgcttgaatcatgttatgctgtcgtttctaatgatcgtccttctttccatttcccctcctctttcttttttccctgtttgataacatatcttgaaaatattgctaaaggttctctctcccccacgccctcctctccctcaaaaggaccgctttgcatggcagtcccccaccatccacaatacctataaggattccctctacctgagctcaccaaagccttatgtcccactcggcacccccagacagcagaacccctcacaaccccagcctatctctgtcctcctggcagctggatcggctcccaaaggtgtggtgtgccctggttccttgcttccggactccacgttccccagtgcttcatcccaaccccagcagcgctatgcagccaccaggacagtttatcataagaatgtgagctctaacccatgtcatgaggcagttgggattaaaaaggtcagcagcttatatgtaccttgtttatccaataacatttgcctggcggcgtcagaaaactcctctcgtgttgcacgtgaccctgccgaaggcactcccttggaggctgcgggcacccgagcaccggctcccggccttgtctcccgcacagccggcacaggaaaaccaccccctgctcctcctcctgaccctcccaagctattctttgacatccgtaaagatgccgttaaccgtggcgagagtccttccctggggactcaggcttcgttcccagatgtgagaccacctgtgctaggcccccgggttacctctgatcccgaaaaccggaagagcaaagaatcttaccttttgcagccgagttatccagccaaggcaagaaattaggaatgtttgtgtgtcttctctactgtctctttcaaaactgatgcgagcagctcattgttcactgggctgccctaccctccctttcctcattaatgttgttgtggcttgagtcccgaattcttctgtctgaacctttcagcacagtactctctttgtctgtctctcttttctgtaaatgtgtaagtatgccggagcgtggaatccagagactaataacatggtgagaaactcattgttcatgttttattacaaggtgccaaagaaattgtatttactcccaagcttttaggctctatggtggtgttgtggggttaaacacagcctgcctgcctgttctgttctttctctctcataaagtgttaaaaggattcaaaaatagatggatgaaaagcggagttggatggggttccctctgtgtcatggagtgtcagaaggccagctggccagctccgactgtctcatgtactctgaggaaagggcactgattaaatatttctcagagtacctcactgcatgcccactctcaaccgtttaaatatggaattctttcctcgtatcatacccctttccataacgacccccttatttccacaggatgccacttcctccagtgcagcccagccggaggtaatagttgtccctctctacctggttaatactgacagagggcaagaaggcactgccagacctccaacacctctggggcctcttggctgcgtccccacaatcccagcgactgcctctgccgcctcacctctgaccttcccgactctagatgatttcattccccctcatctgcagaggtggccccaccacagccagccagcccgcgcctctggctcctttgcccccattagccagacgccaccatccttctcaccaccacctccgctggtccctcctgccccggaggacctccgcagagtctcggagcctgacctcacgggagctgtttcgagtaccgtaagcttgctggactcccctcctcacggcttttctgaatgtctcctcccagcagtcacattccctttctcactgaagcactgagctctgaggacagcactggctgccgctgtgcctgtgtgatgactggagccgtgtcccctgtcactagcgtgcatgcttcccgtgtgtcttccctgggtctctcggggctgttccccatctctgcagtgcctcatctgctctgtcctgttgggaatgcacatctttctccctcagaagacaacatctgtggcctttatgttgactggccatgcttttcacaggccaggtcgggggtcgtgtggtgagctgaggaaagctaagaattatgggggaaagcaacggcaggcgtggtgggtgctacttaccagggagcggggagatctcggggaggaagcgattctctgattctcttgttgacctagtgagtaaataaactctctgtagtatacagaaatgacagagactaggattttttttttttttttttttttttttttttttttgtgagagagttgggtttaagtgagcaagtgggtctgaaagccctgtacaaatgttaggacttttacctcaaaaggcaggcaattgctagggcccctgaggagaaggtcccaggagcctctgtgacaaaacagtgccccagtggtcacaggaagtcaaagggccctgctgcctcaggtcccatcctgtgggtgggggaatgagttcccatcacagccgggaaagcccaactgcttagagaaaaagctgagtcaaagtgcttgggtctcctttttccttaggagccctgggaattgagagaatctgataacttcattgcgagttgtaatatgggaatacgtgaatctactcacagggcttcgggttcagtaggatcgagtgtaaaagttcctgttatggagcttgacatagagaaggtgcctagtgaatgttagctatgttgctgaggacttaccctggcaaatgagggccagggtcactcaaaagcaagtaactggttagttaacaattcatcattgagtttctgccgtggtctaggcattctgctaagtaccctgggtacaaccatgagtcagggtcttgttctcaaagggatttttggagtaggaggtcacttctcaagctttgtgtacatgggatcatctgagggtcagggaggcttgtttaaatcgtcaccctcaggttatactcctagaatttctgactgagtgggtctggagaagagcctaggaatctcacttggtagcaagtgctcaggggtttcagatgctggggtccacaccctacattttgagatacagtcatgtagtgggtcatgcaattggctgatggaactaagcgtttactgacatccctttgtgtaaagatgtatgcctgcaaaactgttccaaatggcttgttaagctgaagccagtcatgcagaaatcaggaaggaaacttttcatttggcttattagataaattataatgaggcatcaaacacatcaaagctgggaaccgttacatcctgagctggggcctgttctgaaatctctagtgctgtgcagtgtagttaggtcagcaccaggcccaatgtgacccacggccttggatatccttctagctttgaatttcgcagctcagtcccattgaagaaaaatgctagatgtttccctggtctattcccgtctaccttcagctgaacttagaatttagaagccactcttgttttggggagttcaagcatcttccctttgacacagattatgtttgcctggagtagcaggtaaggtgtcttatgtttagtgtcctcatagaccattgtgagtagtttgattgtgtattctataatttatttgtgtagacctaggttttcatatcgagttggttttaggtgtaccaggacagattcgttgggacagggtcctcagtttctcaaacctgactaatcagcctggtgtagacctcccagaaggacctcagtttggcctgatagcttcgggtttggccctgggtaacagaggtgaaaaaggaaactacttggattcctcttcctcctctgtcaagaggaggagcctctgtggatggtgtctgagctgtgagctgatgcctgctccatctgtagctagttgagagaaagaaggaagaataaaagtcatgttaattgatttgagttattttaatcaatagctgtttttgtgatgttccagaaataagacacaaaataaaatctgtaaagtgcttaatgctcatatgatccacccaaacatcacattaggcatttatactttaaagagctgtatgcctgatattttgtgtttcttggatgcattcaggcagtttttaatgatatgtcatttatcataattatatcactttggagataaattaggaaaagtgtagttatttttcactttctaaatggaggaatcaaggtgaggcacttttgtataaaatcatactgtgcttctcaagtcttgagaaaaggttttattcatgacattgagctgcccctcataactaaatagcggcggctatttagtggactttcagaagagatagactgacctaggcagtgttgtgaagttcctactgtgtgttgggagctgtcctgggtgctgatgcccatatcctcttttgataagcatttgttttcttgctacaaacatttgctcagacacaacattgctgaaagatcccacctgtcagtcacgtgacatttactagcacctgctatctgcagggcattgggctaggtgtgagtgagggggtggccctcatcttgtgggtacgttcacaggagttgatctttgattattgcttcaagataattattgcctcaaaagtaactatttaaaatcttgttcttaaagccttttaagaagagcatcctcaatttatggtttataaactcaaaaatagaaatgtatagatatcatgaaggaaactgtctaaatattcttagtaccttttggggtcttattttgttttaaaagactggcattatccccaatatgcagattataatgttagtattaataattttattggtatttctggcagagacctcaggtttttaaagtcaggattctcacaagtcttagggatctttgtcactttaatattagagtgaaaaaaatgtcacagtaggataggataatctccaaatctcagaagcaagcatcagtaaaattgctcggtgatgctgatgctaagagtagctttctgaaaaaactgttgctcaactcctccctgttcttacattgatgtcttcttgtcctcacattgtcttacatttctctgtacagtgtactaaacttccctgatttttcccaattaaaccagctcttgttcttggatcgcatttggaattgcatgggttttgcatgttattctacttggatttgaatttggtttttcagtaaccagattgacccacaactgttaacaggtggacctaatgaatgatgttgctgagacttgcagtaacattcaccttctctctctcctccgccccatactaataccaacaaagaggataagcattccggcttaaacttctaactggaattaatgatacgatgtatctcattgattgcatttctttttataattaagatcattgtaaagctttaaatttcttctttttaaaaaacattaacactagctttttatatttacagttagttacattgtttgtttgttcgtttcaggattccagtcctctactaaatgaagtttcttcttcccttattggaactgattcccaagcctttccatcagttagcaagccttcatccgcctatccctccacaacgattgtcaatcctactattgtgctcttgcaacacaatcgaggtaagagaggcttgtgccccactcccagcccactggaatcaacatagctattccatgatacttgggtcagaaattctgttatttcacagaaattttcacaaatcccattgtttcccaaggccatttgccccagtttactcactctcatggcccataaaataaatcccagcagacagacagaggcccctgatctgaggtgatatcaggtgtctgaataagtaagctgggttcgttccacttcttgggtgttcatgattgtcttcttcaaatcgtaacaccaaaaaaaaggagaaaggaaaaagtttgtgtctcttgatggtaatagagatttaacttcgaaaatctaggtacaataatacctcttttaagtagtatcttaaatgatttatttttttgacataatgaaatttagagagagcagaattttgagtatcaaatttaaaaaagaaaacatattgtgtagacaattttctggaatgtaaaacacgtttttgtaccttgaaaacagagactattgaatttttcttgaagactcactggccttcattcttgccagctgtttgtctctgtactatgtggctctaggcagctctgcttagagttttcatgtttgttttctgtagtgtctctgactgcttctggttggtttttctgcttctctgaaaagcagagaagctttgagttggggtgaagcggaagttctttgggtatatgttgacccttctgctttaaaattccagacgatgattctaaatcccaagttttcctttttggaattccatacaggaataaactttgtctttacaaaagtcctttgcagcatgaaatgtaaagttttcaagctgtttcctcatgtagaaagggcttgttagtctgaatttctgataacagtggaggtttaattattttgttcagagctcacgtcttccttttgactctgtgctctctgacttcacagttttcctccactcctccccctcccccttcctctctgcattaatttgaatgagaatgggactggagtctatttttaattgttttccttactaaatagagtttttctgtttcctgcttctaacttgaaaagcagatgaataaaacattttctttcacttcagatctttccactaaaatcttaaggttgttttagtagttttgtatttttttcactatgtgtggctcctgtattaattttcacccatgaatctgggttcttaataaaaagggccccagctcccacacggaaccatgcaggagcccattctccttcagcggtgccatgccccttactggcagtggctctccttgcccagaaagtgtctgtaatgtgggacaaagtgaaattttgtttctctgaacttccttgtgactcatatttaaaaaaaaaaaaattcagtcaaacagaattaagttagttcccagaaggacaggcagtttctttaaaaatgggatttattcccaaggcaacttggtttttgggaaatgccaagtgtaatgtcagctgcttctgccaagtccctctgatgacacctagtgagacatctttgggcacagaaatgcctgtagttcctttttgtttcttccttgaatagatggattccttttatttacccaaatgcctttggttcttgcctttctctgttgtccaagtcctgcccttgggtttaaaaatcagaattgtgcagcctgagacacacatccttcagaaaaggatacaagtaatgacattcattttttggaattaaatgatagatttccataaagagcaaaaccatatgttcactaagcaggtggggcaggaagcatcaggaagaagagaagagcctcactggcccagccccgtattactaatcataaatggggtttaggtcaagtgtttttggcattgctttggaatttgcctaacctggcagctctgctttgcttcataaacagtacccataaaaataatttcttaattattgcaaagtctcctgagggaataactttactccacttctggaattctagttttgtcatcctaaaaaatgcctccctccctgccccccccccccttttttttttttttttttttttgcctagactgtcccagggcatagtgtggcaataatcctgtctctccaagccagcttacccctactagaaacagaggggcactgagcctctggcctggtactgatggttgtgaacaacacagccctttccccttctttcctgagttttcacaccacatgggtatgaagacaaatcgcttaccatctgtctgggagggaggctttgaatcagaaaactctcaggatgaaaagaggtgcgtgggtccccttgcttagggcttctcagtctatgtgcgtcggatcctgagagtcttgttaacttgcaggttcagcctcaagaggtttggggtggaggagacgagattctacattttcagcaagcttgctaggcataccagtgccactggcccaccgaccacattgagaactagagctcagaggttcccagacttacggacacatgaagcagtctagggatcaccctagggtttttcattctaatgctttaaaataacaccactagaaagtggccactgttacctgtgttgcatgtcatcctatgaaagaaaggctatttcacacctcaaaactggagacaacatagtctttttttttttttttttttttttttttgagacaaggtctcactctgttgttgaggctagagtgcagtggtgcagtcatggctcacttcatcctcaacctcccaggctcaggtgattctcccacctcagcctctcgatgccagtagttgggaccacaggcgtgtgccaccacacctggataattttaaaatattttttgtagagacggggttttaccatgttgcctaggctagtcctgatcccctgggctcaagggatctgcctgcctcggcctcccaaagtgctgggattataggcatgagccaccgtgcctggccaacgtggtctttttcatttatttatttatttattttttgaggcagggtctttctatgtcacccaggctggagttcagtggcacgatcttggctcactgcaacctctgcctcccaggttcaagtaattctcatgcctcagcctctggagtagctgggattataggcgtgtgccaccacgcctggctaatttttgtattttttagtagaaatggggtttcgccatgttggcaacatgatcttttaagtggaatacattcacttctgccagctggagctcagcagccttcagtgtagtgtgtgggaaccgtaggtccccttagtaccaatagggccctttgacataacagacaaggaaactgaggccgagaggtttagtgaattggccattgtcatctgaaagttgctggcagagctgaggccagagctgcactgggcttctgcatgttcagccagtacgaacctcatccatgtggcagaggtggccaggcaccgcttcccaggctgtgagctcctgagctgctcgctgtttacttctggttcacactgattgtagcaggagggtgggaacgcagccaaggggaatgatgacagtacccacgggttggcaaatgttctatttttatctatgtggctgctttatatttagcggctgtggaaggtaaaggtcatttttgtactctcatctcatagcacgtacacattaggactccacaaaggagatgtggcttcccttccacatgagtgcccaggatggtgagaaaccaataacccttcaatgccaaggaccagcaaggtcttgatgactagaattggaatgaactctggactaggagtcagggatccaggttctagatccagctgattttcagtgttatcttgggcgatttgtgccccttatctgaagtttctcggccattgctgattttttaaggatttttcttgtactccggacaagccagattactatagtgactaaggccaggctttcgtttcctcctctgtacaatgggaaagaataatcgtacccaactactagagttgttgcaaagtttacaagtgttatttgcaaaagcgctaaaacagcgcctggcatttagcaagctctcaggagacggtcactgtcatggttgtgattataattacatttccctcaaaaggtaccaagactggggtcatataaggccttgctcacttgaagctggagggttggatggattcccttctatgatggaatcatcttgagataagatgtaaacagctagaaaattgtggcagtcccctgaatcctggtgtagatctggaagcggggcaggctgggagacaccacactggcataatgggagccacgctaatacccctgcagtcagctggctgcatgcacattgtaccatctaagtccagaggacagtgaggactcagggttgagatcctaacgagttatgccagggcttcttggtcttactatgtgctgtataaatcttacttacactgtgtgttcttttatcacagaacagcaaaaacgactcagtagcctttcaggtaggtgagaaatatttatttatgtgttaatccctgttcctgttgaaaccgtcttccggtcaccgcccgatattcaatcagcaatatcttccaagatcctctgatgtcttggggagactctttgttgctggactaccaagatgatgaaaataggcatagttcctgcctccctggagcttgcagggtggtggacagaccagaccagtgagccacactagtaaacatgtcccatggaactgtgataagggccttgatggataagaacaggatgttctgggttaaaaagaaccaggagtccagctttagatgcagtgttcatggcaggcctctctgaagaggtcatctttctgctgcttctgtctcccttctggatgtgaggagtcaggggttgggagatatgggcaagttctctcctttttgggtggcaagcccaaatgccagtagatgcccctggggtggtgggtccaggtgagaaccttccgaccagcagtgcccagaagacagtgtgagaaaactgcttcttgaatttgagcaggcatcagaaattcctggagagcttgtcgaaactcagattcctaggccatccccctagagatttggatttaatggtgggtatgagtaagaatttgcatttctttttcttcccttttcttttcttttctttttttttttgatacagcatcttgctctgtcacccagactggagtgcagtggcacaatcatagcttactgcagccttgaactgctgggctcatgtgatcctcctacctcagcctcctgagtagctgggactacaggtgtgcaccaccatgcccagctagttttttttttaaagtttttttgtagagctggagtctcactatgttgccaaggctggtgtcaaatcctgacctcaagcaatcctcctccctcagcctcctaaagttctgggattataggcaccagctactgtgcctggccaagagaatgtgcatttctgcccagctccctggtgatgccaatgctgccctctgtgctgaccgcacttgagtgtggcaggtggcaagagttgacaatggtggggagtgactgcaaatataatcagacatatacaaatataattagctcaccctttgataaagtgtgtaggattgggaccatgtcagagtagggagggaacccaggaaggggaatgtgtagctatttccttgtggcttcctgtagccattctgctttgaatcctgggtctggtgctgcctcaggcaggttatctaagtctctgggcttcagttttcttactatcaagtgaggaaagctgtagtgcctcccaggttgtatgacgatcagatgagattccgctcattaacagctcagcactgagctgctgcttaatagatgcatgacttaatagatgtgcattcctgttaccaggcggcgctctgtgggttcacttaccattgtattcagggcttcctttgtaccctgcactgcacggggctctgaggctacatcagggaactgtgctgcccttgagctgctaatagtgtggcgcaagagtgtgtaacttttctttgttaatggactccttgagagaagctattgaaggcaatagattgattctaaaaaaaaaaaaaaaaaagccacacgtgtaaacatgtgcacatgatttctgtggatttgcacacactcatgaatttcagggttcagaatcactgattggtggataacaaaagccactgttttctgaacagctgctacatgatttctgtgcaacttcatgccactgctgttctgtgattggtggcgagcctgggtggggaggacatggggttctcacaccctctcagccttatcaggacttggctctgagaccaagacaggctgtggttgacctcaaggtgtccttggctgtccctcctccagctgccactctccagcccacctcattctctggccccagccgaggttgctaagagtggtggctctgaaaaaaaaaggtggctcctgtgggctccttcctgttggtgggaatttgaaagaagggtagaatagataaaaaaggcctccagccatacgttaggagatgcagagtttggtcctagctccttcttcttggagctgtgtgtttctgtgtgagtgacttcatccctctaagccagtttcctcatatgggaaacaagggtggtaatccttgccccagcctggaggaggtgttattgtgacaggaatggggaggatgttttgtgcattgagaaaagacatgtaaaaatttgagggtgggccggacgcagtggttcatgcctgtaatcccagcacttagggaggctgaggcaggtggatcacaacgtcaagagatggagaccatcctggccaacatggtgaaaacccgtctctactaaaaatacaaaaattagctggacatggtggcacgtgcctgtagtcccagctacttgggaggctgaggcaggagaatcgcttgaaacagggaggcgaaggttgcagtgagctgagatcgtgccactgcactccagcctggtgacagagtaagactctgtctcaaaaaaaaaaaaaaacaaatgagggtggctccaccgtgctggcagctcaggcttattccttggctctaaaataagactgatgctatcgctttctctgagttttgggacagatctgctgatgatgtttgatagagtggggcctaaagtaggtgctcactaaatattagtttatgctttaaaagaagtagtacagctttgttcaggagctcctgaaagagagagggctggctgggttggcactctctagtctcttagagcaagtaaggcttagccatcacctgtggggacgggactccagggctgccagcctccctctctgtagcagatttttgttgagtctccatgaggcttgatgttcagggagagtcatctgggaatgaagcctacatggtgttctcaggtacctctcagtccccttggggagatggatgggataataagataagggctgggagagagaggctggcatagggtgtagagaggccatcgttcttctgcagagaagtgtgagcattgctgtaatcctcagtcaccagctctcagtgtgaagaaaagggaagctatcccacctccttcaaacagaggccccatctgaggttatcaatattgtcatttatttagtggcccagaaccttccattttaaagcacagtataaaactagaaggaggctagatttgcagtggctcacacttgtaatcccaacattttggaaggccaagatgggcagattgcttgagctcaggactttgagaccagcctgggcaacatggtgaaaccccgtctctataaaaaaaaaatacaaaaaattagctggggccaggcgcagtgactcacacctgtaatcccaacactttgggaggcagaggcaggcagttgggaggcagaggtgggcagattccttgagcccaggagtttgagaccagcttgggcaatatggcaaaatcccatttccacagaaatacaaaaaaactagccagatgtggtggcgcacacctgtagtcccagctacttgggaggcaaaggtgggaggatcacctgagctcagggaggtcaaggctgcagtgagccatgatcatgccactgcacttcagcctgggtaagagaataagaccctgtgtaattagaaaaaaaaaaaaaaaagactaagaggaaatgcccccaggatgtcatgtgaaggatcagcattttcctactgagaaaatagcaagccctcattgtaatatggatgtcaatacctggccctgtcacctgcatggtacagttaagtgtcactttgggttttcattatgtaaagtgacactttttcttcaggggctctctgtatattgaaatccactcagtgatgagtcacatgaccacaagctttcaagtaaaacaattcagggctaaattttgtagatcaaaaggacactggcagctttaggagaaatccatggactatcagcctgattttttcagtcaagtgtgattgttgttagagtcacctgccttgaccctgagtatggcatgtctgtgatcctcaccatgatcttaaagcaccatgtaagactgagcttgaactcagcctcatctgctcctttctgctcacattcaacagaaggcctttccaggtgggaggagaatgttcagcagagccacattaagggtagacttgggtaactcaaaatccctctacacttccaggcttcctgccaaatccttggccttgcattgcaattttctgggagcatgagaactcattccataaagccaatctgttcttaacatcctttgacattgatggtgatgatgccagggatcaggctttctgaagcacttaccaagccttgaaatcatttggatgtgggcagtcacgaccccatggaggagaatgaaagttgtaaaacctgagcatgctggagtcattgtttcccccacttctacagcgtctcctccacttacagacatctctgactttgtcacaactttgcatgtgtcctcacattcttccttttcacccgagtgtagtcccccagccagcagtctgcacctgttcctttcttaaagacgagaacctgtccatagtcaatcaataagcaggttttaactgagcaattactaattgccacagcacatcttgatgcccttcatccttacctcatgggcctcattctcactgacaggattttaggctcccttggcctaaactttttttttttttttttttttgagacagagtcttgctttattgctgaggctggagtgtagtggcatgatcatggcttactgtagcttcgaactcccaggctcaggagatcctcccaacttagcctcccaagagctgaagcaacaggcatgtgcctggctaattttttaattttttgtagcgatggggtctcgctatgttgcccaggctggtcttgaactcctaggttcaagcaatcctcctgcctcagcctcctgatatgttgagaggcatgagccacggcacccagccagcttaaacctttttgtccctaatcctttgacctcttgaattaccatctagtacattccttcctctgtgctgaactccccactcactcccccaacttcctgcttacaccttcaaccctctgtgcaatctggcacccacccccactgccctcctgaagttgctccctcagagtgttcctgtgacttctctcttgcctaatctaatgccgcctcctcctctgcttcaatttctggggtttttttttttttttcttttgagacatttaaccacccacttcttggagttctgtcttccctggttcagtggcaccttgtgtacttttctggttcatctcctgtccctcggattactttgcatcactttggggattcttttgccttgcagctataactgtggtgcccttccatgcatgactttagcgctttactctggccttgcttctgtccaccactgagctctgccatctccctggcgtcagccatcacttttgggctgatgcctccaaagttgcactcctgttagggtgtctcacctgggccccttcatagttcctctagggatctctagggcattcctacttgagtatcttgctgtcttctcaaagttaccatagtccatatggaagcagccatttctccctcccattcctaacccaattctaacttctccatttggcttaggccaggcttccagacttgaaaccttggtaccatctttgaaagaggcaagacaggatgtggttcagagaggactgctagagtcaggtggacattaggccacatcacagcttggctatgagctggttgtgtggccgcaggcagggtactttaacttctctgtgtattgatcctttaactattaaaaaaaaaaggtgataatagtttcttcctcatagatctttgggaggataaaatgagagaacgtaaatgaagagtttattgcattgcttggcacataattagctcagtagtccagaggcccccaagcatttatttaagctgttcctctggagcacccttcgcttcctgtgagtctgattggcttctcttctgagaatcggcctttgtcaccctgcattctcattgctggctcacttggtttttctgcccactagactgtaagctccctgaaggctaagattctggaatgctcaccttcatgtccacaaggcagagcacaatgtctgcccaataaataaatgtcatagcttggaagccagattctattaagtaattttataatcttaggtcatatgtggtatctttgttagtgctctatatcttccagtcttgaacaaaaataatctataatgtatacttagcaatgtacagcttcctgaacactttggcataagttatcctgataagtcctctcaccacattgctgtgagcttgccaatagaagtgttatccctgtttttggataggaaaactgaggcatggaaaagttaagtgacttcctcaagaggaatcgaaaactttcaagtaatgttagccccatcctgtggttctacctgttccttaatttctagaacagtcagaactactcagttgaccagagcacgatgtgcatacctctgcaaagctctgatcacactgttggcaaggcttttttttttttttaaggaccagatgataaatattttagactttgcaggccatatggtttctgtcacagctactcaactcggccatcgtagtgcaaaagcacccataaataatatgtaaaggaattggcatggttgtgttccagtaaaatcagcccatgggccaaagtttgctgacccctgctctaaacagaactaattccagttgagaattagcagacacgcttccccccagctagcctgttcaggagcgttttgttttgcagctaccaaaagagcttcagctaacaattgcttttcatttccagatcctgtctcagaaagaagagtgggagagcaggactcagcaccaacccaggaaaaacccacctcacctggcaaggctattgaaaaaagagcaaaggatgacagtaggcgggtggtgaagagcactcaggacttaagcgatgtttccatggatgaagtgggcatcccactccgggtatgtatattgacttagaggtccttcttaggcttcatcttaagctgtgacaagtgtacactctgagtacatgtgaaccccatcacaccatcgtctctgtaagccccatgagtgccagatcccccagaagctatgctccagacttggtgtacaacagcttttcccaaagtgggtgttggatgttataagtcctatgaataaagggtttcgtggtcaagtaaatgtgaggaaaagctgggtggaccaagtcagagagatttctctgctgtagaacttttcagaggctttgagtatgtgagtgttctagggacaatgttatgggcagtcttcattattgttctgtgtggagcatgttgagaaattcctggtccagggtaagagaatcctggggagagtgtgaggcccaaggtcccttttgacaggttcaggaagatctccctggatgggagatcacatgtcatccaaagtgagtagggaacactaagggaacctcagaatggattccgccagccaagcctccaggacagagcaggtctcatggcatccctgacccagctctccccggcagcacaggcctgccagtcctgcaggccctaaggaattccagggaacaggctccaatgggcaagaaacatttaacataaagctaggcaacttttggaactggatttgggtgaattccattcttttccatgtgtctactagaccattgcctgcaatatgttccactgtgatttccatttaacaaatatgtccctttggaagaggccaatagaaaccacagtggactaagcctcaaaataactcttctctggttctaagtagtaatatagaaggagagttattcctaagagaaatcacagctaccatttgctgagtacattatctcatttaagcatcactcatccaagtgagtaatggatactaatatcatttccatcttatagatgaggaaatggggactcagggatttgttactcatccaagattgcacagcttgtgggtgacagaatggtctgtctgactcccaaacccttacccctaaccgtcacgttggatggcccttccactcaccttctcatcagctctgtgactttgggcagtttgctttgtcattctgtatctcatttcctcttctgtaaagtgggagtgaaaatatctagccacctatctgtcaccttccttgttttatttttatcttaaaaaaaaagcccaaccattccaactttgtggttagggtgaaaactctggcagtggatgctataacgagttatgttttaatgtatgcattctaaatctggccctatgcaaggtgactcggatacattgctgttgaataatctagaatggttgggggcacagcatgataagcaaatatcctttgtctcttatatttctaggagactttccttcagtttggcacagtctatatatggagagattctatctaaaagtgaaattttaaaaatttaaaaatggatacctttcaagtgtatcctcatccactgttttcaaaatctgtatcctttcagccaaatattaccctgtagattgaggtttgggactcttggtttttctctttctaaaaagttttgcctttttaaaaaagataaatgtggctgagttttgaattcagatattgttactttccattttgattttgaaatcataggaggtctgaaatgtgtcaagatagtcatttaattttgctctttgcctttgtttttctacagaacactgagagatcaaaagactggtacaagactatgtttaaacagatccacaaactgaacagaggtactgattttcatttgtagaagctgtgctgtgctatgtgccaatacacgttttgtgggcctgaactcactttgctaggatgccagaagactgggtcctgcagttggacctcattaggtactggtctgcctgagcccagccatgcaccttcagagcacaggagggaggaagcacttgtgtgcctgcctcagaggtggaatttgagatctgctctcaaatccttcctcccagatgtggaatgcagcaggctgagcccagcactctgcctgtgctccagcatctgtctgcctgggatgtgagcagctccatcacccacctgcttccagctttaggtacatctccctgtgtcagcccatgactgccttgtgggcagagtgagttgagaatgcactgaactgggaattaagaacactgttctctggccgggcgcggtggctcaagcctgtaatcccaggactttgggaggctgaggcgggtggatcacctgaagttaggagttcgagaccagcctgaccaatgtggagaaaccccatctctactaaaaatacaaaattagctgggcgtggtgccacatgcctgtaatcccagctacttggaggctgaggcaggagaatcacttgaacccgggaggcggaggttgcggtgagccaagattgcgccattgcactccagcttgggcaacaagagtgaaactctgtctcaaaaaaaaaaaaaaatgttctcacctggattgagtcccccaagcactcgggtaaccttggaccaatcatgtacctttctgtgtttgttctgcttcctttcctccggagaatgtcacaggtctaaaggagaacacatttggccttgtgaagtagaatgcatagtacgcctctcaggctgtgttaatacgaacaataatctgccccagctgagagccagcccttggcaggtagccctgagagtcagtcaggagctgacacaccaaagcccgctcaagctgaaagagcagcacttccaaatcagatgccggctgggctatcagcaggtgacccagcatggagaaccgcaggccagtgcttgggcaggacatgaccccaccggctcccatcgctgcctgtgccgccagtcagctgataggcgggatgcagctgcactgtgggaagggtaccacttctcccacaggcagagcatcctgcccttccccttacccacatccagtctggctgcctgtcatggatgacacatgaaggcaaagagaaagtgttctggtcagtgttcccacctaagtgcaatctctctgatgagctgcggatgccagctaacatcactgttaattaactcctgctgggttcaaagtgaacctgggtgtgcccctgttcaaactgtttctaaatatcgaagtgctctaaatattgaggcgtttagcatttccaatgaagagtaaatccgctgtggttgggtggatgagcgtggtcacagtggtgaaactaaatgcttggatttctgtgatcagatggggtcatctccactcatcacttcctgaagtcactgcccatttcgtcttgcaatctgtgactctcacctttagacccagctttggaagcctaactgcagagacattaatgcatgtaaatgtgcaaaatatgtaattttgccccacaggcagctttggtgttctcatgttatagttcttaatctaaattgtaggtgctaaacaaaactacctgccttaatggtaggcagaggtatttgaaaaattaatgatctacttgtttgctgaatgtccacaatacaagctttgatttaaaaaaatcatgttaggatagcatgtttattacatactatttattatcatacttaatatttcttgcctatcaaaagtaaaaacctgatgctttatgttaaatgtttcttgcccattggagcctgttcatggcaattctttgtccaagaagagtaatggtattgtctctttctatgtgtctcggtaattcaggcaaaaggactggatttttaaaagcagtttgaatttctttcatatcactagtgaagcttagtatgttccagaattcaaggagcctaaattgtatgtggattcctactcgtttattctctccatttgtatcttcctctattctctctcccaaacctgctcctctgcctagacactcctgaagaaaacccttatttccctacgtacaaattccctgaacttcctgaaatccagcaaacttccgaaggtaccataaacttagacagcatatctgttgtccgagctttaaattaattcttatagttccattgtaggcataagatttgggcttttagattttattttcatagtcatttttggctggtgaaaattttatttcactcatttgcatgatgtgctatgttaaaataactaaatcctttctaattcattaatctatttttaagtgtgatgcctgtgtgctttaataacactaaaataggtaatcagtcattcgaaagagtcaattgggatttgtcacttcctctacttcctggtggatagtttcaaaatccactgcttttctctgctacagaggacaatccttacactcccacctaccagtttcctgcatctactcctagtcctaaatctgaaggtaattaaaggaaaattgtgtgcctctccgtactggtgctgctactttcttttttaccttggggtttttcctggtggctaagggctgtttcccagtcatttgcttccctctaaccttgtgttttgtggtggtgtctcactccttgctgactgtatcaccggagtctatccagatggtattttagtcctattcccctagggtttacatgattaacggggtagccagtgttagcttagttacaatgttttgaacatgtggggctctggtcaaagctgcctttacccaactacccaaggctttgtacctgaggtggtcacctgatgctggtggttgagcagtgactcagggaagctgagtcattatagcgggtgggcaggaggtagatctgtaaccgtcaacaggaaaattacccagttctcatgcctgcaactaactcttttcatgggccctcagggtatctctctttggtagggaattcctaaagaggtatccaggtataagattcagtcatagtgggagatgacatttcttgaaaataagggttttagctaagctggaaaacatttaatgaaagagctggataggaatttgtacctgctggggaagacagtcacatttgtgtctaagaaatattatttctggggaaaaagtctaaatgtcaaggaagtttctaaaatgtgagttaggggcaacatcttgagaattatcctaatagcagggattatctgatctttggatgagtaatccagatgagggtgaatagatacggtatggaggaggaagttttgttaaatactgttctaggatgagatgttgagtgctctgaacttcattcattcaagtagtattgaacacttgctgtgtgccaggcactgtcgttggaagtaatgccatgaataggacatgtaccccatcctcagaagttcccatctggcagagagttcagcaaggtcacttcagctgactgagtccagtgtgggggcagttgtgagagcgtgtgtccagaacgccacagaaaaccttgccggcacacagtgggccctcagcaatacctggaaaacagcgatgatgaaggctttggactgtggagccagagttctttcttagggatgaatgccagtgccaccatcttgatgcttctctactctaatctgctcagcagaccatccctctcagcccttctcatcattggtaaagttgttcattcaatcattcaccaaactcttactgatcagtcatatatgagatgacacactgggatgtgttggatacagttaaaataccataggccatttttggtctctcatatgccccagtaattggtttccaaccatttcatacctggggcctattttgaatgaaaagaaaggtctaccaaacaaacccagacttacagaactaaaagctgataatttaattctgatcagtgtcttcctcaaggccaagaagagtctatttggtgtagagagcgcagtctttctgtctcatgatactgattaccacacaaaagcattggtgaagaaacaactgactgagttgagttagggagttttttcagagtaattttgactagttgcaattttcgatttgtgctttatttagacttgcaaacccagccaaactcgtaagataagagtttccttcaaggcaacaagcacagagcatgcagaaggcacagtatcccacggacacaggcaaaggaaggcccacttgaagaaatcctgtggagaggaacagtggctcccatcagactggaagactgccttaggcctgccacaggcagcacccacagcttccacagtcagcttggctgttggtccaaagacagggtttcatggccgcacagccagagctcctgtgtcatcagccaccatacctagcaacccctgctgacgatcacgtctgatttttggcatgcatcaagtccagcatatggggaactggatttattttgcatagaggcataaacagtaagggatgtcatgataacttatcacatataatttagaagcaaaccttactatttttttattttcagagaccgaaaggaagaaatagtcttaaagaataaaaaggaaaaaattaggttggatataaaaaaattaatagcaaagatgattagactttaacacaagtttctaaaaagacatcctccctggagatcttttaaaaatagggtaaattccatctcacgcccccactcctgcctagatgacatatccgggcatagatcactgatgtattcaattagatcaaggcttcttacaagtgatggaaacatttgagctagatcatttaaaataatcacagggtttttggttttgaggtttttttttttttttttttaaaccatttcaagagagtctctggatttcttgatccttgatttgtggttttcatgttgtctgtgagctccagcagggcctcatcagccctgtccgtggtgctgctccagctctgtgctccccgataggtggccctgcgctctatgcacatccttcttaacataggaaagatgtatgcctttcaaagaaaggcattcaagacagatcagcaccaagtggaggctctacccacagatgttaatgtgcattaagaaacagcgttactgagaaatctgagccatcattccagagtctctctcctggggagaagtttgtttttactgctgggtttttttgtttggttttaattcagaatttggaactagaattatttgtaataaacctatcaaagcctagcctaagggctgccatctctgtctaaattctagttgtttatacagtataaaaaagacatttctaaagctctcaaagctgatcctcctcaatagtaagggactgtgtgaaagtttgtttatgctggcttagcaaccttcttttttcccccagctacagtgaaaaagcaaacttttggccagacttttagactataaatagagttatcatgtctcagtcaatgagggttaaaatgttctttttaaaaaaagaaaactttggaaattccaagaaggggcagtcacttttaatcattttgtaatcttggagactgctgtctacgggatggaagagatgttagcagaagggagggggcaaactgtgcagaaacagcttcagaaatgcagtcccccactttcttccctgctgctttaaggaacagcagtgtggtggccaacatctcagcagcccagagtggtaatcctattaataataatagtcttataatgacataaccaccacctcagtgactatgtggctgtcattaattgagcccttgccacatacaagtttctgtgctgaatatatcactattgttatctcattttcattctcccagcagccccatgaagtaactcttcattttatcaatgaggagtatgaggttcagagagattaagtaatatatgcaagattacacagtaagtagcagaaccaggattcaaacctaggtgtttggggctccattaacacaggcttttactcaacgctgctatactgccctgcagattcctttccccttcctgactctgtgttcttgcttgtccccttcttgtccagaggctctctggtatctgactgcaggcattcagcttcccctgagtcagtcctgcctcagtctgctaagccagtacctcccagatggtgcctggaaatatatagttagggacccagcacggtggctcatgcctgtaatttcagcactttgggaggccgaggtgggcagatcacctgaggtcaagagttcgagaccagcctggccaacatagtgaaaccctgtctttactaaaaatacaaaaaaaaaattagccagtgggcgtgatggcaggcgcctgtaatcccagctacttgggaggctgaggcaagagaatcacttgaatctgggatgcagaggttgcagtgagccgagatcgcaccactgcactccaccatgggcaacagagtgagtctctgtctcaaaaaaaaaaaaaaaaaaaaaaagaatatatagttaggaaaactcctcaagtgattgacagacaggattgagaaccactgggatggggaaataccactcttcccagcccccaaaaagagatgaagaaaattggccagatgcagttttgggaatatggatataggatgagaatggagaatgcagattttatagaattagcgccccctactctgaacacgcccaaatgatgttggctcacttggcacatttgatgtcaagaagagggaaaatattttcaaataatggctcagaatttgcagcaaaaccagataactggtatgttacttcatggtccgtggcttctcctgactttccgtgacctgtgaggacctcctggaccatgtcagtgagaaggcgagtccaggtgaagccccagagaccagcttttttcccatgctttgtgatgcctcttctaccacttcaggctggtggtggccactgccacctctcggtgatgtcactcaagacaccacctctaggcatccccaggttgtggtgtcaaaatggtctgtctcagtgcttcttcctcattcctagaagagattgcactaaggcaaggatttaaagaggtgcatcttctcaggcacagctgtagttgagttaaaataattctctactggccttacaggatttgtaagaatagctttgttttgtttgagttcaagcaaataattctattgtgaagatgcttggccgggatctgtgcctcctgccccagactccagccagtactgcccaggggagagtctgagtcgttctcctaatgagagcttcccaggagatctccgcctagcaagtgcaaaaggcattgactggcctgtgggacagttaagaaacggtagcagttactccctttccaccttcacggcccaggagttcgatagcagatgaagacggtgagtcttcttctaaccctatggttctcccaaactttctcctttaacttattttttgccccacctcattctcttcttcagagttctatttttttctctgtgtcttctataactactgtacaccctatcctggtctttttttttgcattctttagaacttgattgccacatctgtaatcccagctactcaggaggtcagggcagggggatcacttgagcccaggattttgaggctgcagtgagctacgatcacaccactgtactccctccagtctgggcaacaaagtgaaaccctgtctcttaaaaaaaaaaagaacttgatggcctttaactaaaacatagacagctttgtaatgctttcccccaagctctctgggcttcctgacgtccttgcccttttgtttgttcttcctttcccaccccacccagactcagtacccaactctacatctgtgtcttttcccctgactactatttttgttcatgggggtcatgtatgactatctttacccttttatcctttctcttcctaagtgtggggggtaaagccagaggaggatttaggttgagcagtggaagaaagattgtgtcaaaaatgagccattaatatttggaaaattgttttaagtttaaaggcctgagaaatgcataaaattgaaatttaattgatataggcaagtggttatgcaaatgatttttgcccatcctcccattttagtcaggcaattttttagaacaactttcaacaactactttcttcagttgtctttgagatttttataaattaaagaaaaagaaacaggaaaaaaaagtgatttggaagctcatttaaagtcactgtggttgaaaaggcaattatgtggctcctggcagttgtaggagagtggctgtccccaaatcgagctaccaaggacagattgccaaagcccaagaagaatcattgtgtaaacattagagctcagctggaccttcagaggcctaagtgagttgtttaccctgtgtaaatcccatgcagtgttacagcttcctgcaaatcactggcataggaaggtctgagtgttgctgccaaggtttgatgtctgctgcttggagctctgaggagcacaattagcatgtggttccaccatgagcagaaaccacaagatttctgcacagctgagcccactctagcattgttttaaagggcctttggagaaatactgaaggccgagcttcaggtgctaggtaatagacaatttgagaaacatttcatttaatgtgtcttaactatattgagcacacttgtcccatttggctggctctagtgtggagaaatgcagacatgctccttacactgttttcccattccttggtatttctaactgcatacccatcatccccagtgttgacttagcctcccaggagaaggcagcaaggaacagcaactattaatagaaggtgtagaggccgggcagtggctcatgcctgtaatctcagctctttgggaggctgatgcgggtggatcacctgcggtcaggagttcgagaccagcttgacaaatatggtgaaaccccatctctactaaaaatacaaaaacaagctgggcgtggtggcaggagcttgtagtcccagctactcgggaggctgtgacaggagaactgcttgaacccgggaggcaaatgttgcagtgagccaagatcgcaccactgcactccagcctgggcaacagagtgagactctgtctcaaaaaaaaaaaaaaaagaaaagatgtagcaagagtgactcaatgttatccattgtccctggagaccagcaagaggaaaactagaaatgtgaggcaactcagaaaacttgcttaaacatcactgagggcgaggggatgcaaaaatcgggcaaaggcttcaggggctggaaattggcctggccagcagtgcagtgcatgccttgagtttcaagacagcatctttctctgcctcttccataataacatggtaatagaatagccagtctttcagctttcccaggattgggcagatgaagctggggtgaaagaacacagtaggcatctctgtcacggggctactagatgacatagggaagtggaatctgaaagaccttaaatccatttctgctttgtctgtctcactctgcagctaagggcaaatcttctcaacctacttgggctttcatttccttgtctgtaaaatgaggtatttagttcctcttggagttttttgcaagggtgaagtgagatgacgttagtaaattaccagccattgttagtcacttaatactgggagctacaattattatttttattcataagctgaggtaaaatatccttccattagatttacaagacaagcatcgaaaattaaaataatggattttacaagccctagaacttgtcctgtgttatagttgttcagatgaatctgtatgacttgtttgtcctgttaaaagttcatgagctgaaatccacatatcagaacctgtggaccctttgggagaaatgaaaacttgttcacagatactctcctgccctgtgttagcctggcgtgggtgagatttctctactgacactgaataagaaacaagtgttttttgttttttttttctttagagacaaagtcttgctctgtcatgtcacccaggctggagtgcagtggtacagtcatagctcactgcagcctcaaactcctagactcaagcaatcctcccacctcagcctcccaagtagctgggactgcaggtgtgtgctgccatgcatggctaattttttaaaaatttttttgtagagatgggatctcgctatgttgcccaggctggtcttgggtttctggcctcaagcaatcttcccgccccagcctcccaaagcactggggttatagatgtgagccaccaggcccgtccaagaaaggagctttaagcacattcagttcttcagacgcctctgttacctgcatcccccaactccaactttcctgcttctccctctccttttcaaagtacatacattgttaaacttcccaagtagtgctgtttttttccgcatcttataagaactatttctcattttcttcttcttactttttttttttcttttcaagacagagtctcactccatcagccaggctggagtacaggggcacaatcttggctcaccccaacctctgcctctggggttcaagcaattcttctgccttagcctcccaagtagctgggactacaggtacatgccaccacgcctggctaatttttgtatttttaatagagacggggtttcaccatgttggtcaggctggtctcaaactcctgacctcaagcgatacacccacctcagcctcccaaagtgctggggttacaggcatgtgccaccacgctcaaccagtatttctcattttcttctaataaaccttctagagttccacattagaaagctctagatagaaacattttttaaagagctcaggcttaaaaaaaaaaaacaaaaaaacctgaatatttaaatgccactcctctccacccagtgaaaactttgcttcttacttcatgaaccaggtaatagttataaattaaccttcatcttatcatctactgataagctataatttctccatgattcagagatgtacagggttttgagctaaaatgctaggctacgttttaagcagtgcatacatcagcttctaactagctaacttttcatttgggcattttcattgcagcattttttctaatcaagtccctgtaatcaaagctcatttttagttttctttgacatcatggcattttgtcagtataatcagacgttctgtttaaaaaaacaactgtcaacacacaatttttcagaataatctttcaaaaaatctttttctggatcccactttatctctttcccctgttctattttcagaagataacataaataagcttacacactcaatttaaaatagtgaaaggcttggctatgttggtagaaaaaaaccttaagccctgttcaaccttgatattgataaattcttgaaagtgagggaaggaagtaggggaaaaggtaccttggtacccgatgcctgtcccttatgtgggccaagggagacctgagacaaataaaaatggggaaaagaggggacaagaaggagtgattgttagagaggctgtctgaataatgctttatcaaaataatagcaatgttagcttatttatatttcataaaatattctggccttgtctcttctgaaacttaaaatgatttgcatagaaacaaggacttgattaacacgaagtcaccaccatacagtggattctttgacttgtctttgcaggttagttcatgtgctttcctaaagttgtcatgaactttagggaaggaattgggtcttcattccatgtatgtgaattttgaatccagattagcaagatgttagaaatgggaaaggctaactatttcagactaactctttttggtgtagtgctttggagggaccatcatggatgtagtgactagataaagtgcattttcaggacagtcccactttaaaaacctgttcccatcaatgtgcctgtggtctgatttttagttcagaagatacagccacttccacaagggcttcaggtcttgtataggttctgcaagttttagaacccagtgtctagcctacgtaggaatgtgtgtcatgcctttggagagccacctcccaccatagagacacgcgtgagtttgatttgctccagagatgcagtttagatactcactccgagtagtacctttgcagaggaagccgtttgacgatgggtctgttgtgttcccaggaaacaaatctactcagggaaccagattgaggtggaatcaaaacaaattttgatgagggttttctcaaattcttctcttagctgcagaacttctttgttaatgatgtgtatgaaagcttaccatataaaacaggtcaaagctgaggcaagaagctagaaaacccaccctctgggcctctccttcccacccaatagcagcccgaggccccggtaagaggcctttcaagacactgttgaactcggtgagcttaaccgtacactgagctggtgcagccggggatccatctcagcccctgcttcccactcagccagacccagaccctgcattccagctttggttgtgtggattctctagagaaggacccttggctgtttgtccccatgcatttcttgatgtcaggcagcagcatctgccagttgtgactgtcctgcctggactacaggtttggttgggtgtgccctacaaaccttgctcctctcaaacgtgctctgccgtggtgtagcttctggcgcttcactcttctgtccgctgggatccctaggggggctggatgctcgtaccagactgtggaaatggggaacatacaacttggttctcttaccttagccagacttctcctgactacattttgttttgttcaatagatgatgattcagatctgtactctcccagatactcattttctgaagacagtaagtgacttcaaataacctggttgtgggggcggaagggaaagtggtggatgagggaagataattgccctgttctcagttttcatgagttttaagtcttttgtctgcactgtctttctccagcaaaatctcccctttctgtgcctcgctcaaaaagtgagatgagctacattgatggtgagaaggtagtcaagaggtcggccacactacccctcccagcccgctcttcctcactgaagtcaagctcagaaaggtaagtgcccgcttgtctctcattcattcagcctgggccttgttgttcattgagacctaggagcctccattcttaggaatgtggaatttgagtctgtcccttgtcacctattagcagtgacttatttcttagcctcaatgtcctcctctgtaaaatggggataaaaatagcatgattcctagtaaggatagtgcaaggttaaaatgagataatacctgtaaacattcctggtagcacttagctcctagtatgggagccaagttaagagtatgggcttaattaatattgactatcattatcataactttttgcattttcacaagagaaatcttaactgcaagatttgtcacatgttgtcatattctttttgcatactgtgttcacatattcatagcaatgactataacttaaaaagaagccacactttttaatgtccatttactcatgcaacatgtattattgagacataagccttggacttgttctagtgacagcattaataaatctcttaaaatgcctgcagcaaacaaaacagttttctttttcttgagttttttttttttttttttgagacggagttttgctctgtcatccaggctggagtacagtggtgtgatctcggctcactgcaccctctgcctcccaggttcaagcagttctcatgcctcaggctcccgagtagctaggactgcaggtgcacacaccactcacggttaatttttgtatttttttagtagagacagggtttcgccgtgttggctaggctggtcccaaacacctgacttgagttcttatctctaaaaatgccctctgaagcaatctcctcatgctatttggacaggagttccatgcatcttctagccccaacttacaccacttctcaacacacaaaaggctctggccaaacaaaattatttacttcttccttaaatacacatccaatttcacacctctaccttttccaacctcacagacaaattaatggctgtttttaaaagcaccacacgaacttaagtggcctctacctgaggagtttgataattaatttgaaaagaaacctgggtatacccacaaatcctttatagttgccttcatccagaacccactgggtgtattccctgcagatttaaccatatatcatggaaggatataggtatatataaatcattgtctctgccttcaagaagtttacagccttgcatgaaaaacttaatcacagtgcaaagtacggtaatgcacaaataaaaaatttgcaaactagagcttatagtaaacaaaacagcttggtactagcataaaaacagacatatagaccaatggaacagaatagagaacccaaaaacaaatccacacacctattgtgaacttattttccacaaaggtgccaagaacatacattgggagaaagacagacccttcaataaatggtgctgggaaaactggttatgcagaagggtgaagctagacccccatctctcaccatatacaaaaatcaaaccaaaatcaattactgacttgaatctaaggtctcaacccacagttacctcttccctattccagtgtggaacagggaagaatgcaattatggtagcaactgacatttattgtgtggttactatgggcctggcactttgctcagtgattacatgtgctgtctcatgtaaattgtttagtccttacaacaaccccatttttcagatgaggaaactgagataccaagaggtgaaatacttgtctaagatcacctagttagcaaggggtgtggcaggatttgaaccacagtcaactggctccaggacctgtgttctctctcactgctctagtgtgaatgggaagtacaggcatgtctgtggaatgaaaagcccatagagcgaagcaaggtgaaagatttttccagagccagctttgctgctgccgcctctgttcctgttgctttgtccactccccttcctggtgcctggttttgagcacaggacatctcaagccttgtgagaagcgaacaccaaactttaactggttgttttgagaagcaaaccaacacaactaaattgttcaccctgactccgatgttatgctttggatataacagttctttgattacactacagccatccaaagtcagaccgtgtcggaagctaatgccagttgtcatgaaaatagctctaatagaattttctttctgcagaaatgactgggaacccccagataagaaagtagacacaagaaaatatcgtgcagagcccaagagcatttacgaatatcagcctggcaagtcttccgttctgaccaacgaaaagatggtaatgtgcatattaaagttattttgtctcaccgtgcccatgttctttaatcagaatgcattgtgcagttggattacattctttccccttgagatagacttaactttgttttgaagataatgacaaaaatgaagtacttttacccttttcatttttgcaggtgttcataaaataagtcccgcgagtctgcttttaaaaaaccctcttattgtggctctgttgctttttttgtgcatggttttaactaatattaatttttctactaacataaagattgattttgctgctgtctttttttgaatgtctaagtgttcatttatcaggcttgtcattaagtggactgaagtccagttttttttaagtgactctgaacaggcataaattttgtacaagttactagaatgtcattaaaagctacataactaataggatgttgtgacttggaaaaaaggcccaggctgttagaatatatcctttaggtcttccttttttgacaagtgcaatattgaggacaaatttcatattcgacctggtttatgattccctatacaagtttacatctctaagcaattatgagtggggaaaatggtttgtatgcatatagcagaccaccctggaaaagcggcctcttctgtgaaacaggaagaattcttacacattgattagtttcatacctgccaatcatgcatccttttattaacccttcattgggaaaagctgttttggaattgtgatcctggttaaggggttctccaaagctccataaacattgcagtcctccagcaggacagcaggatggaattattatgctggagtttggtttttattaaaatacggtcaccacaatgtctacagaataagcaggcctctgaaatgcaggctcaaattatgttccctccgcctcatcggctctacatgttttgaaagaagaatcgatttgacttctactgagataaaaatgtgacatctctaaaagcactgaaggataagtcattttaattaggaaaaaaggtcaacaggtcacagaaatacttagagttgtcattcttcagcgttcactatgcaccagttatttcaagcagaaagttcagagaggagcacagaatttcgccttctccccactactgcccttctttggaggttctctgctgttagaagatactgtacgtaagaaacatagaaggtaaccttgcacccaggtgctcctgcaaagaaagtcgtgctccttgggtttatttccaacactgggacccaccattacatattaatacatttaaatgatttcagggactctgtagacctttgagtgtttttgttttggcagtattaccattcatagattttcatggctcttaccgaaggctcccttttcttaatttctcctttgtttccagctcctttccctggttcttagtcatttaaccactactcagaactaggaaaaacaacatagtttagtttttctcattgataccgcaatagtttaccaggatcttccataccacagttcttgggatcatttacgttgtttttacaaaccctgaaaagtaacacatagtgccccacggggccttcttggagaatggtggtgagcacgtacatggattgcaaagctcctctgtgtagtaccaagccctaagccaagccactaatggggcatgaacaccaaaggcaggccaaggaggagtaggaatgtccaatagtttcacccagtttagctctgttcctccaaagagaagttttagttgaatcttaatcttttgacagtctgcccttcacagtagttgaattcatcctttatgtttgattttgtttcctgctgtttttatcacatggacagaaaaggtgaagtgtgagtttcagcatgtgagtcttggcttttggtatctagtatctggtttgccagaatttgagcatacacccccatcgccccaaaacacacacttccgttgttaactgtgggtaagtatactaactagtgacagatgtagaatgtaagtctgctctcagatatgcactacctcattttaggagaaaaaatgctttttccatttgaggtacttacgtctgcttaactctggcaatttaaattgtgacttcataggcacatctatgcatggttagcaggagaggttgccctagagctcaccttgccctggagcatactctaaatcattccagaaagatgaaagaaacactgtactgccttcaaaaccccctacagaagacttacaaacttgatgacctagtcatctatttgaaagactcatatgaaggtctttttttttttttttttttttttgttgagatagggtctcactctatcacccaggctggagtacagtggtgtgatgatggctcactgaagccttgacctcccaggctcaggcagtcctctcacctcagcctcccaagtagctggggctacaggcacgcaccaccatgcccggctaatttttgtatttttagtagagatggggtttcaccatgttggccaggctggtcttgaactcctggcctcaaatgatccacccacctctgcctcccaaagtgtgggattacagccatgagcccgtgcctggcccagctaattttttattttttgtagagatggggtttcaccatgttgcccaggctggtctcaaactccttggctcaagcaatctgcccctcttggcctcccaaactgctgggactacaggcttgagcgaccaaacctggcacgtatgtgggtctttatctctacttggtcccctcttatcatagtaggatacttttttctcttctagccttggaattggagatctattggtcagtccttgctttgtcagaaatggcctttttcaggactcattcttttataccttcctctaagtctcttacagaagttcagttcagttaaatatatacatacatacatacacacacacacacacacacacacacatatatgtagtaggacggacagatattaaaagagggattacagacacagtgtacattttagaagtgtaaaacaaggggatttccccagcttggtttcttcccagttcatcctcactttgtgttcctttcctggcttttcagcatggtcatttagccctgctttagcttggtgtcatcgcaaacttagtgggcctgcccccctgtcatgtggaatatgaaaaggggaatatggtatagtgtaaagaacactggactaggaattggaagatggggtgggtcaaatgtgataatatgggtacaataactgaatattatgaagtgctacacagacataccacattcaggcgacttacttaattggaatttgaagctggtctctggcttccattcaagaagcaaaactgtctttgaggagaagttggcatttttctggtgagttacctgcccttttccaaggattttttttgagctgggagaatagcctgtggtactaaagaactttgccaggcattatggaatttttccctgtctgccaggccagagttcctgctctgtgtccagaaggatgtttttctattggtctgttccataacaggatccacagctgagttatacttggcaaaatcaaatgcagatgtgagggctgtgtggtatcacctttttagctttatctctgggcagctcaaaggactgaggctggttgctctcacccatcgctgtttgacataacctcctgattctattattgtcacagcattaacctccacagtaaaacgatctgcagacaacctttgggaataaaataagttaattacttcaggatcatgagtaccaaaactttcaggcagttccccgaaagagctggtacattttatttaagaaaaaaaaaaaaaaagcctaaccattcccagagggcagtttataaatagtctttgtaaaaataacaaacatgaaatagattcatgaaaccccatcatattaggatctagaaactcccaatgtctaaattgccactactgagtagttgtgtttttgtaggtattgtacctcctttcactgaattgaataaatatagaatccatttactacagggagggcaaggcttctccttcaggatttaaaccgtaagtccctaaagacatttggaggaagtcttatctggatgcaggaggacagaccttgtgtttcagtatgattttccctccgatttcaacctagcttggtttcagttaaaagaaggttccctgccatatttccatagtcctctacctgtagcaaaagtgaaagtaatgctaaagattcttttaaagatcttagaaaaagggatggtaaaggtcactaagaaagttagcagccatttttctacaagctgcaaaggggatgttaactgtgttgtaagtaaagtacaagaagagctgctttgtgaagcactagcattaaagacctgcacaccacacatggcaaccccctccctcaggtgttatagcccagaagtagtgaagtttgttgtgcagtgttttcaatctcagtagaaagtgtatgcattttatatttcaggttattgtagaaaatcaccccaactctctttttgcgattatcaatgttttttgaaacatatatacatacttaattagtcatgaacctcaaacacttttccctgatgtaaacatttctccaatttatgaaggggaaaacatgatttgctttgcacacattcattttccaactagttatttccagaaacacgtgttattccatgaaataaggtgccagaactttatacttatttggttaaatattatatcccatgaaatcaaattatcagtctattgatacctcatagtgttatataaagtgagaaatctaacttatttttgtcatataacccagaagtttttttcccctttgttctgttatctgtcttgtctagcttttctttcactttattttttcccaattctttaacatttatttgttaaaacacgaagtatattctgtctgtattcatccgccatggatacttgtttaaaatgttttttcactgtgtcctctgtctttacttatatcatttttcactttcactttactgtgtacgggacatggtttcctacctactcatgtgccattaaagatgcagtattaaccaattggcttttataaagtgtcaatatttgtgtttatttcgaaaaccttaaggcagctttgcaaataagtactaaagttgtactagcccataaaaatcagctctactcaactggcatagatggctaaatgtttggtgtgctcaccaggtcatttgctcataactaatagttctttgtaaagggctttcttttcttccacattactgaaaattattgcagaatgctgttatgcccagattcagacttgttgtgtaggcagcagtgtggtgcagagttgtccatctatagtccattttcctctgccttagggctgagaatgattcacttactgttccctgcctcaatttccctgtttttataaacccatcctctccctcctgtttttgctgttgtcagtaaaaacagatgattgctgctgttgaatgcagctcctgtatatacctggaaaccactgcatctctactggcctgttcctatgtaatctttgcataatgttatccttctctttcttccatttctctatcaccaacccctatagagtcgggatataagcccagaagagatagatttaaagaatgaaccttggtataaattcttttcggaattggagtttgggaaaccggtaagtttaatagcttcagtggttatacaccttttaaactaatgctgtggatgcgttgttgctgctaaagaatcagatgtttgtaaggaattcagaaagtggggagcagtcatgttggttgtccgtagtgggattgtctcttctcactacaacctctgagctttcttttgccttacttcactgagaaaggatagtgagctctggaagtatatcttgctggaatatcccagagaaacacaaataatcattgcttgtcttagacctccccccactaacaacaagtaccacatgccttgcggatggcattatttcagccattgttttcacttccttgaccaaagtctttatggtctgtgaaagacaagctgaaaatgtgttacacactgagaagaccagcattgtctctgctttaaatagcatttttaaaagcacatatgtaaatgaagtcccagagcaggccaacaaggacctctttgtgcagatgtgacccacaaatgcaaccccattataggtgacttttagggaatgatttctatgatgtaggatatttcccaaagtttgaaatgggagtaaggaattctagcatctttagtattcagcctacagttgccccatgatatctctgaattggctttggtacaaattgacttttggcacttaaaggaggattttcttagccttgcacccaaaggaatataaaatagaagggagaattgagctcatccttcctctagagataacgaaactgactttaaaactctagttattttaaagtcttaattattacagctgcaaaaagaatttacaggtagaggagttaagtgtataaacacattttattcaatgattgtatgagactttatgcattggatccagcttttgagtttctgtggtctgggatgatagttttatttgcagacaggaatgtattttatagttgagtaaataaaatgttttaaaattttttattaaaacaaagacaaagagaaattaagttggtgcttaggaattgctctttgatttggcagtgctgagctttgaaagttcaggcatcttctgagttaagagcaccagacttgcaaacagcctgcttgttcctctcttctggtccctcctagacactgtctcccgatagcagctgagctgtcctggatgaacagcgccacctagtgaccagtggagagggacgcatctgacccaaagtctgcaccctccttctcccctccccaaagcattggtgcacacctcatttcttctcctttctctcctttctttttttcgcctctgctgttcaccattcagacatcagttaaatctacctcaggcaatcttttccacgtgcagtatttaacagtatcctaaccctttctcttttctccttttcttaaaacctggtcaattatgtcaccgaaaaaagcttttgctgtgtgtagttgtctccccacccccaaaacagaccatgattggtatatgaaacaataatgccatactttagtcaaggaaagcaaaagctattaagttatgtttaatagagtccatgccgttgatttttcaagtctgtttcagaatccacacatttctgcccatctcatctgccaaacaactaaattagttttatctaaaatattagctttcaggaaaaatggtggaattttttccctaattagttgtgattgttttactaaatctatcattacaaataatttttgaggataatatatagtattttaataccagcatacatttaaatagtctccatgcatagcttgataaattaacagtattgctgccaaaaacttcactccaggtaccacacagctaacttcaaacaaatgttgagaacacagtccagttgtatactggggctttcctctagcttgtctccccaccccattgctctaacaacctcttaattatttaaagactcagagatgctttttcaaagtagcattttctctgaagccacatgcattctttgcacaggcctcagagttcttctaatgagactgcttctttttgtgtaggtcttactttaaaagataatacttgtgaagacttgccaaattaactaaatcaatgcccatatcctgaggaacagtcctgaaatgaacagctccttatggtctgaggcatcctaatggtgggcttattacctagttgaactaacagggtttgggaggaaggtgtggtaaggataaattttttcttcacttcctactgcaaccactctgccacaaaagagtaagagacataaataaaagtggcataaaccatggaagctgttttggaaagcttttcagccattcagaagcagaatcaaaatcctaccagatcatgggaatcagcatttctactttttttttttctcacaccaactggggaccactttccccagtaaagcctgccagaactttgacactagacatttaccctgaactccttgcttcctccaccccttcgctttagccacccaaaatgaactgaaatttcagcaagatcctgactaaaaagatacctttttagctccaacaagttgttagaatagcaaatagttcaagactccagggaccatttttggacagattatttaaaaccagtttaatttgtaaacactgccctgtttattgcagtaaagaaatgatcgtaagtcattaggctttaaaaagtctacttctgcagatgaacagtccaagtgtattaagtgcttaaagatgaatggtaattggtaatatcacttactttatgaaatgcggaatatacatgtgcagagatgacattactgacctgttgctgtcagtggtgaacacaccttggaatcagattacttctcatttgcagatttattacaaagagcctgggaatcagttttttttctgagttgttttcctctaatttctatagaaattgacatgatttctatatgtaagagcaagtcaaaatttcacaatgtaaaccaatttgaatgcttccatggagttggctataatgaaatttgcacaaaattttaggagctattaatgatctcctatttcttatcaccctaggggtcattatgtaagaaaattcaagtctaaatagacagaacaagtagaagagaggatccagagttagaagtcacctgtaacctctgaatgttccacccgctggactcttccctcattaaacttacaacaatcttttggcaaatttctgtcttaggaatgcagctgtaaatctgacttgaagagttaaaagacaaaacaaaaataaccttacagtcccctctttaaattctgggtttaaactctgttctctaagggggatgaaaagtatgtttctaccactatcaaggtctagttaaactgtaaaaggaggttttaaaactactggtatgaaattgtctagtgtactatttaacacccattttatatatgaatttctttgctacaaaccacagaaagtaaatttggttcagtctgttgaccaaacctctagattcacacatgtgttaatacacaatgaattttacagcagaagactgcctcaaaaatgtggaatcttcagtgtcaatcttagtttgaagagaacaatgaggaatttaaaagtttctgtttttgttcaaatttgttaatgctttttttttcttttttcccccccgtcttttcttaagttttcaatatttagaatccaacgatgatttgctcttgaaacatagacatagaaacagacttcctaggtaacagtcccagctcccaaatcctcaggcttccgctccagcaggcagccttgtgtccgtaggcagcacccactccccttgcttttgagttcacctttctgtgttgatacagttctcccagtgtacccctccttgtttgagccagtctccatgtttgtctttatgtctttatgctcatttcttcatttcctcctctgcttcccgtcagcctcccaaaaagatatgggattatactcctggagactgctctatccttcctagagaggatagaaaggtaattccgctgtgcctcctccgttggactgtgtgtgctctctagccttggttagtgtgagtgtgttgtgggtttgtttgtttgtttgtttgttttcttaaatcacttttgaaaaaacttgatgcttttttttttttggttaggtaataaaactatgtaacaaattctctaagacatatactaatgtttagaggtttttaaagcaattacgtattcttctgacatatagtatttgtcactgtcaccacactctgaaaaaagagaaaataggcatttccttaaaggtaggtttttgtagttctccgtagcaagtagaatagctttttgaagctctgatgacttcaggatttctgctttatatgcctaatgttacattctctgttttcatgtcttcaactaatttccagtgagctcttgtgttttaatcatgctatcttggccgtatgaaagtataacactaagaaaaaaattcatttttttcaaacgtaaccttccattctttctccctttcctctaaactaaaaccttctttcccatcttttctttcttgaaccagactaatctagacaaagatctcagcctctgccagacagagttagaggcagatttagaaaaaatggagacgcttaataaagcacccagtgcaaacgtgccacaggtatttcctagtttttctcatgccatcagttccttttcaagctgtgctttgttttcttctttgttctatggtttttgatgtagttgaggtgacggatggtgatgctggctattttaggctgcatggctttctgactactgttttagactccttcccccacacctacccagttcatttttgcttggttttcttttgagcttggcatcttccttaaaggggattcttcaaatatatgcagagaggctgctgattgaaactactctcccaccttattctcttcctctgctttccaggggcgaccttttaagttcccttcctttgcctctgtctgccttctctgaattttcagggagccatttttggcagtttccatgtcttttttgcagccctgggagataccaacctcaaagatcagtttcaaaaactcagcagcagtgctttgggtaccctttctgtgcatggtgctctcagagtagtagtgtttgtcattttaaagttcagaaagttctcaatgaaaaatgcactcagaggtcagatggcctggacacacaaaaaaagtgtttgaaactgagtctgccatgatattttaaagggagctatgtcaaaatgtggtttattaaagggtatacgagagagagtaagagagagagagaaagacatcatggtaagtaggtttccaaggaggaaaaaaccaaatgttcatagaactgcctggagggctccctgacaaaacaaaagagactcttaaaaggaaaaggtatctttagagaaggtacaaaaggaggccgggcgcggtggctcacgcctgtaatcccagcaatttgggaggccgaggcaagtggatcacttgaggtcaggagttcaagaccagcgtggccaacatgatgaaacccagtctctactaaaaatacaaaaattagccaggcatggtggcaggcctctgtattcccagctatttgggaggctgaggcaggagaatcgcttgaattcgggaggcagagctgagatcacacctctgcactccagcctgggtgacagagcgagactccgtctcaggaaaaaaaaaaaaaaaagatacaaaaggaatatggagctgaggaggccaggaaggtccacaaaccatgacaggaaaagtggaaactgctgatggacccatgccacacttaagcagaaccaagacagatctccagccccagtgacttgggcacaaaagtcatgagagcagcagagactcaaaccagggaaggggtgaagagaccggggatttggtctggggtaagagagtcaggagccaaggagctgcaggttgcttgagggtgttaggaattggggatccagagacagcagagcatgaggaagccagcagggccaggggttaggctcaagctctccctcagcacttgaaggagccaccagaggcactgcacacatgggtgaggcagacaggtgatgggtggggcaggtggggtggggttaggggctgagtttccaattagggtgaaggaaccagattagccactgtggaattgaaggtcccaggtgagaagagatcacaactagccctggagtgagaatggtgactgtggctgtggtgagagcccttgctgggtgtgccagcatgcagtgaggagggcagatgcaagccaggtcactgaggatgttgcagtgggatagtttaattaactggtgtaaagagcaaagaattgggggatgggattaagacaaagacaaccttaaggttttggccaggcagatggaagaatgaggatgtgagcacgtcacagaggacagctgggaagaagatcagggcagaggcaaggtgagggagttggctttaggtaattgacctttgaggtgttggttgggtgtcatataggtaatatccggtaggcagttggaactctaaaactagagttcttggaagaggcatgggcttaagatggggattggagtcacctgaggagaggcgatggttgaagccctggggatagaagaagatacccaactagggagtagatgaaagactgaagaggggattgtgttgagagaaaggatgtgaaaccaagaactacccatggggacgttgggtgatgtggaacaggagaaggggagagggagagaaaggagagttcacagaggcggagggaaaagcgaatgatggagcaagaggagaaagcatgagatcttcccagatgtccagaaaggtggactcccaggaaggtcagtggatgtgatgactaagatgtttccaaaggctttggaggttgctgggtgagtagttcttgggagttagagtatatggcaaagaatctggagcctgcagaggtacagcactgagtgaaaagatgtggccgtgggaggaaggaagggaggggagtgttcccagaggactctacagggtcaaagttttttcaaggtggaagactggacaggacaggtgttcagagataggagactcaagaaggagaggatgggcaggcaagacagtgcagccaaaagggctggaggatggatgtgaaggtaagaggggtgtgctctctgaggaataattggggtggcgtggggtacagtcctcatcccagagcagaggtgccctcagaaatgaaagcatacaagcccaacaggtttcagcaggcagggggctagtgggtgagtttgcctctccttccctgtcatttccttttctctctttcacaatctcttccttttctttctgtcctttccttaaatgtctcttctccaaatagctagtttttcttaaaatggtcattattagagataaggccattatttaaggtagaagtatctttaaaattaacctttgcattgatttattcaactactcccttatttttaaaaacaagcatatcaaagcatttgcatttttctctccaagacaacagaaaccctaaactacagaattatgttgctttttctctgcatgtagctcttggttgttttcttccttttgcgtggtgcctggtaattttataaagcattcccttattcatgctgaagtgatcattaatgtagttggtgaaattgcatttctccccatttctgcactcctaaatttgcaggcatacacaagttatctaaatacagtgtggtattttaaagtatgcttttgtacatgctggacctaaagtgttgggtgaccctctctctggatgtggcatttggggtgcatgaagggctctgcattgggctcagaggggggtctgagggctgtggagaagctggtggaggatgtgctgtccatgtcactaaagcatgttggcccacggtgggccattgcccagtgacctgtgacagaagatgagtatgagccaggaggccttctcctgacccacccagagggccttggctgcatccactggaaggcaaaagaccaggagtaggagagcccacctgcccatacattctccttccagagaaagagcaccaccctccaccagcaccgaagaccttttccttccagcccccctgacttccagaggtcctggtctaaactaggaaaaagaaattgacctctctctttttcctcttggcttgaaacatatgagtcaaaataaatcatctacattatttttttcttcttttttttcttttttggacatgtacagagctcagccatcagccctactccggaaatttcttcagagactcctggatagtaagttgccattttattttgtttacattgcttactatgttaaatgtcagaaatgggaagagagaagtttatattttggacccagagtgtgttttgtttgtatcagcctaatggctctgaatgatgtacagtttggtgataaaaagtgatctaattatagtcttcaaattatttttcttctgttctgtcctcctcttccaaattaattttgtgatgatttgtattaccttttataaagttttccccattttagcatcttcacctttagaatgggagtttatttgtctaagtttagaatccaagttcttgcctggcatggtggcttatgcctgtaatctcagcactttgggaggctaaggcaggaggatcacttgagcccaggagttcaagaccagcctgggcaacatagaccctgtctctacccaaaaaaaaaaaaggaaaagctgggtatggtgctatgcatctatagttccagctacttgggaggctgaggcaggaggatctcttgagcccaggagactgaggctgcagtgagctgagattgtaccactgcactccagtctgagtgaaagagccagactgtgtcccaaaaaagaaagaaaaaaaatctcatttgctggttcttatggggaggggagtgtgactgagacaggccacatctggtgtaaagattgtgggagggggctgggtgcagtggcttacacctgtaatcccagcactttgggaggctgaggcaagcagatcacctgaggtaaggagtttgagaccagcctggccaacatggtgaaatcctgtctttactaaaaatgcaaaaaatagctgggcatggtcctagctacttgggaggctgaggcaggagaatcacttgaacctgggaggcggaaggtgcagtgagctgagatcgcaccactgcaccccagctcgggtgacagagtgagactccatctaaaaaaaaaaaaaaaatagacggggggagggaggtgccgagaaggggctaatttacctgattctcacatagatgggcatctgttttcctctgtcagttcttaggactctggatgatgcatgcataccccactcctttgtggggtgccaccagcctcttcccctgccaaaccatcctgaatcctatagcagattgcctttctcagcactttgctgtgaagctgttatcccagctgaaaatgttcagtgctaccctcacctcctgttctatatgtgataaatagcaaacattttagcttatatagataggccctcgtggagccttcctgtacccaggctcacgttagtacctctgtggtccttacttctgttgctgtatacctgacatatactcttgtatttttataattgctagtgtattataaactcctcaagggcaaggccccagtcttcacagtgcctggggcacccagtgaatttaggaaaggagcttgttctggtaggagcttttcttattttgtcaccatcgcatctgtgtcttgttctttgaaatatgacaatgaggggaagacacacctattacctatgctagtagggttggataaatccacaatgagcagagttgctgagtgtataaggtttttttttgacagatattgtggtctctgggacatatcctacctacattgctggagaatgtgctttacaggaagagtttcatttgaaagtcagcagggatttgggtattttggtggaaaaatggaaaaatttaatctatttagggtagtgatcaaaagctctagctagatccatcatgttaatttttcttctataaatatgtgtgtttcatgattaatatacccaggagcataagaagaaattaagaagacatattaagacagcagctagagaaggactgccttaggggacagttcccaccttggagaaggactggtgtaaagtctcttgcattcactgtggggttggtgactcagtcgccaatatgacaggtgtcagggctcaggtgtagcatcacaacccgtgtctcctactctggctttgcagctcactcccttttaaagagcttccaattgagccgggccttcagctctaaaaatgacaataagtcacaggtcctctaggtcctaggatgtgccttcagagatgaagcccaccagatgaccctaggctacctgcagataaagggtgtcctcaaggccacagctccgagcaagctctccttggtcccccaggccacctctttattctcagcttgtcactttggcagtcctgactgcccgtgttaaccctgctgcctgctctcctcgtttacctcctcacctccatccccctaaactgcacaagacggaaagggcttcatgggacagctggcagagtgaattccctagctctactggatccaaggcactaagctctgtattctaataggaatgtagatatagtcccttaatagttttgggacaaaacacacacacacacacacacacacacacacacacacacacacacataaggttagtaaatgaaaaggccaagtggcaaatgctaccacaggcagtcaggataaaggagcacaggtatcgaataacatcattttaacaatttatcaggcatttactacgtgccaggtcctgtgcttggtattttatctaccttacctcatttaatcctctgaacattccaagatgaggcattatttttaatccccattttatagatgaggaaataggcacatcaaagcagtgtaatgccatagttcctcagcaggttcagggcagagccatatccagattaggaacggtgaagctctaggccaagggactagggttggcagtaaactctcatctgccccatactgattcaaaattttgtaataagttagcagaagatatactaaggtttaatgttttcaagctattaaaaaacaatttagacctggcgtggtggctcacgtctgtaatcccaacactttgggaggccaaggttgggggatcacttgaggccagagttcaagaccagtctgggcaacatggcaaaacttcctctttacaaaaaatactttaaaaattagctgggcttggtggtgcacgtctgtagtcccagctactcagcaggctgaggtggaggattgcttccccgggaagcggaggttgcagtgagccaagatcgcaccactgtactccagtctgagtgacagagcgagactctgtctcaagaaaaacaaaaagcaaacacccccccccacacacacacaatttaagcaactatttatgatattgggttagcaggattggagggtactaatgtaagctgactaaaagagcaaattgttttcagacactgtgaatgtgcgtgaagatattcaatctgttaatttaccaagaattcttatttatatcactgaaaataggtcttcaaagcctctgtttttcagctctcatgaaatacttggcaggaataaatgagttttttcctcctgctagtctaccatttggggatttttcagtaatcgggcttggttttcccccagtttatccaaatgaataagattttttcatatctggaattggtgaggaaccagcctaaatggggtgcctgacacaaaggaaagcatacagtaaatgtttgctcaatgaatggatggatctgtaaatcttaatcaactgaaatccaacttggttagcactgaggcaggcagcttgtaagttgaacctagtgcctttcactggttggacaggaatgatgtgtaggcagaaacattggcaggacttgaccttaacccaaagaatgaaggaggaggagtcacaggtggcccaggttcacagttttgtggcaactggagaagtgatggtgttgttttaagtccactttaataaattggacagacttcaattgataattttattaactaacactgattacatatgataatattaaaagaactgggaacagagaggaattcacccatagtcccaatatccaatacaactacaagtccttgccttcaatatatatattttttataattaacatcacagtgtgtgtccagttttgtactttattttcctagcatttcagatctataaatcagtagtggtaactactcattactttcatttcaatgtatttcagcattgattaaccttctttgcctaaccaaagagctttactctatttgaccagcaggtggcactcaagaacaagctgttcttccctatatggtgatggtagactagcaaacgctttttccccttaatctgatttgagaacaaaacacagatcataacctgaagaactatatgaaacagtagaggtcctccgggactttacaaatgtgtcagaaatctgtatgcatgtaggcatttaattttatagaatcatttattccattaatatttattgaacaaccatgcaaggcaccagatatgcaaggattaagaagataaactttctgccctcaaggggttccaggtgtaataggggagacagatttgtaaataaccagagtccagtggggtaaatgcaatgatggggcccaggagggaggagtgagcacctattgttttgtggaggaagaaaggttaagctttatggaggaggtgcaaataaaatgtgaataacaatatcagtatagatataatttttttcatgcagtacaaaaggctataaaatgaaacttctagaggattatctagactccttcctgcaaagccacagttaacaacagttaggttttttttcttcttcttcttcttgaaataactaaattattttgaatggtgaatgtaagctttatgaggctggaactttttgtccgttctgttgcctgttgaatcttcacctaggagagcgattgacacttaatagatgctcagtaaatatttgttgaccgaataaatgagcagtagaatgacatgatgagatcttttctagacagagatgactggagggcatcagggctggagactgggggagcaatgcgtgtttgttgtacagttgtaggtgagcaatgataaggcgggaggtggagagtaaagggattaatgtgagctgtgtcaaagatagggaagaagcaggacttggtgactgattaggcttaaggagcaaggagagagagagaaggggaccgatttcctgagctttctgggttgtgtgatggaagatggtttgggacacgttgagtttaagatgcctgagaaacattcaggtggatgtctagaaggcggttgaatgtatgtgtctggagctcaaaagaagggtctgtgtacataacagatttgcaggtgggtttcttgtacaatctccccatgcctattagttttgcaagtgaaagaaattgaggccaagagaaacagactgttcgcaagtttttaaacaagagtgggtttgcctctactgatccacattccttgttggagtcaggtgggaatcccagtctccaggactctgtccactgcctccggaacctgcccgttagcacaattggaaacagttggccctaggatgattgctctgttctctcactttactcttccagtgagtgtgtttttgttgaatccccttgaaactcagcagccagctctgcatcttagccagaggctgaattctctgtgctagctcttcttgcttgctcttcctgaaccaaaatctgggttaatcaaggctgctcagagctgagcttctgaacttaacttgttttgttaagtactcagctgctattcctgattggacctttctcaaccagctgaggggataaggctgcttctctcatcctctctggtacacttggacagagcaagtactctgtgaccttgggcaaatgcctttgacattctggtcttcagtttccccttttgtacagtgaaacaaatggtctctcttcaacattagaagatctgatggatatgatacacttaaaaacactgttgtggctgggcatggtggctcatgcctgtaatcccagcactttgggaggccaaggcgggaggatcatgaggtcaggagctcaagaccagcctggccaacataatgaaaccctgtctctactaaaactacaaaaaaaaaaaaaaaattagccaggcttggtggcaggcacctgtagtcccagctacttgggaggctgaggcaggagaatcacttgaacgtgggaggcggaggttgcagtgagctgagatcactccactgcactccagcctgggcgacacagcattgttgtagagctcttgggtattgtttttaaacaaggagtgcctcagtttcaaaatgttacccatctggaaaaagcatgttttgttagctttggtatcagaaaaaaaacaattggcttggcaaatccattctgagagatttcctgagtgctagtttatcattctggtaggaagcaggaaaaaacggtgataatgggtggaataaggccagagagtgaggtggctgaggggttggggtggggtgagatctgactgttggtgaggtagagcagagatgtgaggtcaggcagccagttatggtcaagagtcatgacagaacaaagttattaggaacttaggaagatggcttagaagttctggacaggctgggcatggtgattcacttctgtaatcccagcactttgggaggtcaaggtgggtggatcacctgaggataggagtttgagatcagcctgaccaacatgatgaaaccctgtctctactaaaagtacaaaaattagccgggtgtggtggcgcatgcctgtagtcccagctactaggaaggctgaggcaggagaatcacttgaacccgggaggcagaggttgcagtgagccaagatggcaccactgcactccagcctgggcgacagaatgagattctgtctcaaaaaaaaaaagttctggccaaagctgaggcaattcaaaggatagcaggcacagcagaatggaagctgctgtcagtcactctgttaaaagaaaaactttagacaaattaaatttagcagatttatttaaggcatagaaggatttatgttcaggcagcccttagaaccaggggcagttcagagagcttcacccagcaacatgggcaggcagcatttataaacaacaaaagacagcaagtacagctacagctggattggttgcagctccacagttgcctatttgggcatttatatagatgtgggctgatcagttggcagcctgggattggctgaagcttggctgctgtgattggctgagactcagctacttgttataagagcatactcttagattgtactttgtttacatagttaggttgcagaagaataggaactcaaagtatggatgcagcctcaagcccaatttagtttactgatctccaatgcttaaggaggtgtggtagccccaaaccaaggtgggaggggcttcagacaccataccttcaaaagagacctcagtcaccacagctgttggtcagcaaagataaaggacatctattcatggatgtttttgctgttgaagttatacaaaaaagaggaaacatagcattaaactgaagggcaaaatcagaaaatgcaaccaaagggaagagggtggataatgaataggaaatttagaaaagggacatatttatttttaattaggaaattcaaaattataagccagtttagatcaactcacatttatttaaattggcatatggtgccacagccttgcaagctaccctcaggttcttccatctcctctaagtaaagaggaaaagcatttgacctccacatccaggccagagtgaattaagagggtcctgggggagctctgacccccaccctcggcagtcccctgaaatagggtatataaagcccttagccccaggtgggtacaaggtgaggctcagtaagtggcagctctgcgaggggattaccagtgccagaagcaatagtattgctcaggggactttattattctaaggtggagatgtcgcggtattctaccagagtccccacctcttttccatttctgactcctgtgtctggtgccgcttatcttaggggtgtattcatggtgagtaacactcagcagtgatggtgtatacggagctggagcatccctgagctccctctggttcctgtggtgtgcaagccactgcctcctcagttgtaggaaaatgttgtatctattaataaaacagcagctgaaggttgggcacagtggctcatgcctgtaatcccagcacttttagagggcaacgtgggaggattacttgaggctaggagttcaagaccagcctgggcaacatagtaagaccctgtcccaacaaaaaaataaattaatgagcagtaaaataaaacaggagctgagagagaatactatccgtgtagtgctcaatggcctagttcaagttccagccctgccattctgctaacctgcctactttgacaaattactgaatctctcagtgccttgtttcctcatctaaaaaatggcagaagtaggaatgttaggattgaagtgataatgatcaataggcacggtgcctgccacataggacgcctcaccaagaggtgtgtagagttgtttttgctgtcattaccagtgaccatggggactcagaggctgcaattatgcacagaaagaaaggccagtttcccggaatgtaaaagcatcacattattgatcgttgctggttgagtagaggaaaatatagctggacagatgtgtgatcaagcagtcacagtttgtggcccccgtagaagctaggtggggggaatatgggtgttcactctgtaattctttaagctgttctatatgttagttgatgttcacaatgaaacagagggatgaaggaattccacctagcaatgggtcttcagagctgaaaaatctattttgataccagtaacctgagttgggtaggaataaaagaagctcagcagaagcctatgtggttctgcgggataggagtcattcacttaactgagaaatatgtgtgtgtgtgtgtgtgtgtgtgtgcgcgcgcgcgcgcgcgcatgtctgtgcatgtgcgtgtctgtgtgtgtgtgtgtgaatgacagtgtgttagtggcaggcatagaaaagtgggattaggagaagggagggactcagtgagtaagtacccttgatttttttttctgtgcctcacctcattccaaaaggaatttgtggtaacttgcagaaatacctcgatgttaacaagataaaaataaatggaggctataaaggagcaattgtttatgcttatactacatgtcaggtcataatcttctgaacacaaactttgaaagaagtgagtgcaaatgtggctgtgatactaagagcccatagaatcccaggttccaatttcacttggtcactgatttttctggagacccaagacagttgggcttccccctttcattgatgattttatattccaaatgcttacgaagaataaccaagaaaaataatccaggtagtggacttgaagtagctgacactgcctggctacgtgacagaggcacgtctgacagagagcttgactgcaccatcttgcgtgcagccattgggtcctcctgccctcccctatgtgtgatcctccccctgttctcccctatccttcctccaacccttcttccccaggcagcgttccacagaatttttcttttaaagcacaaatgtagccattccaattagagaactttgctgtttggtcaagattcctgagcattcagggctccatgggcctgtctgtagaaatgtctgtctaaataagagcactctttagaaaggacagttcttgattaggataccaggtgtatttcttgtcctcagcaggtaatgtgctgtttgaaaaatgttaaaagcactaactcctattcttatctttattttttcccttttctctctttctttcaaaattacctgttcatagtatatattcttccaacttccatgcagtgaagagggaatcagacggggctcctggggatctcactagcttggagaatgagagacaaatttataaaagtgtcttggaaggtggtgacatccctcttcagggcctgagtgggctcaagcgaccatccagctctgcttccactaaaggtaattaactgggtgaagcctgcaggcctctgtctcccatccacctccattcactgagcgtcggccgtggtgaacctccagcaatggggataagtcctgccttgttcagacccacattcaggcctcagagccctcttaaattccctcccctattttcttaccggccatttttctttctggttttaatagtttctgttcctttgaccccccaaccttgttctccttcaagatttctctctctctctctctctctttctctctttctctctctctctcattctaattaccttttcttagaaattagctgagctttagccattcctaactctagcagggtagccatttttttttgttgttgcatccttgcacctgctttgcagcacagattattttgcttccggacctcgactggaaattttttaaaagcccttatgacaaatgagcatgttacctctcctttttctttttagcagctttcagctttaacctaatgggtctatttattttattctgcatgcttaccagtggatcgtaaaggtgggaatgctcacatgatttcttcatcttcagtccatagccgaacgtttaacactagcaatgcgttaggccctgtgtgtaagcacaagaagcccctgtcagctgcgaaggcctgcatttcggaaatccttccatccaaattcaaacccaggctctctgctcccagcgctcttttgcaggaacagaagagtatcctcttgccctcagagaaggctcaaagctgtgagaacctttgtgtttctggttctttaaatgattccaaaagaggcctccccctccaagtgggagggagcattgagaacctgctcatgcgctcccgacgggattatgacagcaagtcgagcagtaccatgagcctccaggagtacagcaccagcggcaggaggccctgtcctctctcaagaaaggctgggatgcagttcaccatgctttatcgggacatgcaccagatcaaccgatctggcctcttcctgggctccatctcctcctcctcgagtgtgcgggatcttgcctcccactttgaaaagagtagcctggcattgtccaggggtgagctgggccccagccaggagggctcggaacacatccccaagcacaccgtctcttcccgcatcaccgcttttgagcagctgattcagcggtcccgttccatgccatccctggacctgtccggaaggctgagcaagtctcccacacctgtgctgtcccggggcagcctgacctcagcccgctcggccgagtccctacttgagtcaaccaagctccatcccaaggagatggatgggatgaactccagtggggtctatgcttccccaacatgtagcaatatggcacaccatgccttgagcttcaggggccttgtgccttctgagcctctctccacctgctctgatgacgtggaccgctgttcaaatatctccactgacagcagagaaggcagtggcggcagtgttcatggagatttccccaaacatcgcctcaacaagtgcaagggcacctgcccggcctcatacacccgcttcaccaccatccggaagcatgagcagcagcagacctctagacagcctgagtggcgcctggatgccagaggggacaagagcaccctcctcaggaacatctacctaatgagcccccttcctttccggctgaaaaagcccctccaccaccaccccagacaaccttcccctggtgactcctcaggcctcctggtgggccagaagccagacctccccagtcagccccatcaggaccagcccccttctggggggaagcccgtggttcccacacgcctgtcttcccgacacaccatggccaggcttagccgcagctcagagccctctcaggagagacccacggccctggaggactacccaagggccattaataatggaaactccgtgccatactcagaccacagcctggacaggaacaacaacccacaaagtgaactggcaccatcccgtggaggtggcattttgtgtgtttgcctagtctcacctgcccgtccctccactttgcttgcattatcccgtcctcctctgtgcccttggtgctcattttctggtctgtcctttgttttctgtttgttttgcttggcaattaatcatggctcgtagtggctgcacttctttaaaaacaaagcccccatgtcatttagactaaccaccaaactgtgtttcgaaagaaaaattggccgtttagctcaactgagaaatgtgttcatttgaactcttgaaccccttgctgtttgcaccaatccccaacataccccatggttttttgagaggcagcctctctcaatggccctatatgtgtgtgagtgtgtgccttgtccctataaggtcctgcacgcctctttgtagggacactttacaaagaaagttctctcattttgctcaccttttgccttttgagtagttttctttgcattaaactagttcacaaataaatccaaaaaatggggtggggggtggaatttttttttccttcagaattcgaccattgatcattaatcaagaatgacttcaaaattttgatatttataatagatgaaaggtgaactcttttcgcaagctggtttccagcgaaatctttgcctgttttaactctactttgttgttttaaagattcagaatcgccaagacattttataccagctgattacttggaatccacggaagaatttattcgaagacgtcatgatgataaagaggtaaatcccatcttttaaatccattagtttttgcttggaaaaatgtatgaagcaagtacagattcttgacatctatcagagaggtgacatgatctagcaattagaggcaaaaattgaggctttcacaagtgattttttcatatgacataggctcaatcatgcctcttttagtggacttttccaaaaagtaggactgatttccccacaggcactagcttataaatgccaagtccagccagcactgctgcatgggagatacagagattgtccactgctgcacttaatgccctgtaagctagaaaccagagtttgctctttcatccccgctcaaccccacccttgataatccctaaagaaatccacctgcatatttctccaatactgcccacccctctgttggcacaaagcattgttcaaattgagaagggtgcaacaggagaaagaggaaaatgaaaaatagtaatgaccttgatacattttataaaacaatttgaggaagttgcctataactctcttgctttcaattcagaagaaggcagatacaccaagaaatgctggaaaaccccagccaagaacttcaaaatgtgtatattttcttgtagctactgaaatgcctgtcctgccatggggtgactgtcagggcctgagaaagagccccttttcttggggatttgggaagaggaagttcttcatatcagccaaatgggcaaaatcacaagcttctgctgggataaagcattgtgatgatacatgctttctgggcctcacatccccaagaaaaagagtcctagagattaaacaagctcccaagcccatattcctgaaatgaattaagagctggaaaaatcaccttgacctggtagcagtgggggagggtgtgcgtgtgtgcacaactctgtcctggtcacgttcaagtctgaagccctttttctctgttgttctgctttgttgagtagttccagagtttaggtggggtttcccgaaggatttaggataaggctgacttggggatgagtaggatgatgataattattgccaccagatggtgaaacaaaagacaaaaataaaaccaccgtggccaggtgcagtggctcaagcctgtaatcccagcactttgggaggccaaggcaggtggatcacttacttggtcaggagtttgagaccatcctggctaacacagtgaaaccccatctccactaaaaaatacaaaaaaattagccgggcatggtggtgggtgcctgtaatcctagctactcaggaggctgaggcaggagaattgcttgaacctgggagatgcaggttgcagtgagccgagatggcgccattacacaccagcccaggtgacagtgcgagactccgtctcaaaaaaaaaaaaatgaaaccactatacctctccccatctccaggcacaattgaacagtactcagtaagaaacttgcacctgtccatggaaagaaacaagaggaagcatttgatgtatagttattatttgtaataactcactaatgatgagtgtccatcaggccatagagcagattcatttctatagctctttgttaaccatttcctgccacaagatataagattcccatgtatgtaggccagggctgctatgatgaaggaaggtgaaattccattttagtaatataagccctagtctctgacctagaaggttttatgggacaattcttgcctaccacatgggaggtgtagtttatctagtggtttagcaattgatatattagaagttacataagaaggtgagcagttgtctcctaaataacactggctcatagattcttaaaagttttgtgtctttatccatggtttttggcttatatggttaaactacagggctgagggacttactaaggtgagattcaagtactagattgggagctttaccccattcgatgtccacttccactgattatgtttaactccagccagaacacaaggggccttgagtaagaactgtggcagtttcaagcatcactccattcccgtggctacagaaacagctcacactccccagctcatggggtgtcagtcaggccctccccattgcaaatactttatcattgacatggattttcagaaaatgagacatatcagacttggcaggaacattagtggtcatgtagtgaagcccctggtttagtccaggaagggaccacagcaaggtagtaacttgcccagggctggatagtaagttaacttataccaatagcagagctagaaaccagggctccagatgcctggaccagcactctttctatggcactgggcttcgcagaggactttctcatgtcttttctaatttaatctttacaacttatttgagtactggaaatcccacagccatttgatgagttgtcacttcgttatttgtagtctttggagaaaaatcgggcccaccctcctttaggggtgcaagtcacatgaggcatttaattgcctgctggacgaagcctactgtcttccaatgctaagaattatccattctaattcatgctttcctacaaggaaagttaatcccaggaaagtaagattgtttagtatcagaaaacacattaaaattctattccatggggtcattttaatgggcattgagggcatttggtaaaaagcaacattgtttgatttttcaaagaagcctttaaaaatagaaatagatgactttttccttactctaagagagaatatttcttctaatcccaggtagcgttattcttagggtttttttttaatatttatattctctgtcattccctttaactcagcttcatttcacccagtgaagaagtcattcagtaaaaaagtaagtgatgctgtcagccacataattagcctttggtgcatatcctaaggccttctaaaaattgtgcctaggggaagagttggctgcctagaaggggcatcatcctttctgaaatgggcaagaacatattagagtaagagatacaggaagcacaaaaatgacctggtgccatagacttcactagcagaagcctatagcaggtttaataggcctgaggtgggtaggaggaattggccagccctggtcctgccaggggaatatgctgtaggaatatatccctgcctaaaaacagggtagagatggcacttccagcctcctgctgccagcccagcatggttgggaatgccctggatgtgccccctggctcacctggccttttgctgccagaagcaagaggctttgggctgagccgggggtaggtagtttgctggacagtgtaatcatgtggaatcatccttcccctatcccggcttttccagtgaagtgctgcctcctttctacagtgcttggagggtggttatgatgggagtgtaatagttgtggctctacagccgttctgacagctgagtcttaaagcttctgccccattcacccagtacctccttccctaattacttttgttggcagttttctaatatgctggaacagatgattcactgcccattttatgcaattttatggcagaaacttttagcggaccagagacgacttaaacgcgagcaagaagaggctgatattgcagctcgacgccacacaggcgtcattccgacgcaccatcagtttatcactaatgagcgctttggggacctcctcaatatagacgatactgcaaaaaggaaatctgggtcagaggtctgttttggtcacctcaatctgctgcttgacccaaagcaatatttgcctatttgcctcccctcagcattgtcctctgtaggccagtttagttctccaaacagcatctgtcatcctggcctcccttaggcttgctttggcttcttgcggctggtaaatagacatgaccccattatgtcctgtgctctgtatgttcaagcatgcctggctgggggaccgggatctgctggcacatgcccctgttgcatgccttagaccattggctgccttcatgagtccagccctccacatcctgcattttatcatgctactgtgttgcctgtgcattctgcttagaaaccttatacctgagtccatatgcattggtagctatggtgtggacagttacacaattcttctttgaaaagatggttaatgaaactttacgaaagttagcttaacaataatttatgccatttacaaaggcctccaaatttagtgacattaattttgaaatatagaacagtgctgctgctcacatgtaggtggatgaattgtgtgaagtgttcagcagtgctgcagtagtgcgcctcactaaagaattttgaagcccaaagacttttgcagttaggaaaaacccacagagggtaagagagttctccaagggacgtttcatttgttcttttagttttgacatttccaagcctagattatgaaagcttaatattataagaggaaagagaagaacaaactttgaagtgatttttatccagatcttggcctcctgcactaaggtcaacatgtcgaaattctcatgctagccaaatgctgtatcttgcgtaagagtttatgctttgccatgtaacccttaagtagcgctgctgaagatgatctcttttagggaaaatgggtaagtctgggatttagggtgggagctaggggaatgggggaataacacccaaagtatgtactgttttataacctttcagtacagtagattaatatttgtttctatcttttttattttattttttatttatttttctatctagagtatcattgcctatcttttttattttagaaatatgactgggcatagtggcttacacctgtaatcccagtactttgggaagtcaaggtgggagaattgcttgagcccaggagttcgacaccagcttgggcaacatagtaagacccccatctctaattaattaattaattagatagattggtagatagccaggtgtggtggcacatgtctgtagtccaaactactgaggaggctgaggcaggagggttgcttgagtctgggagctcaaggctgcagtgagtcatgatcatgccgctgcactccagcctgagcaacagagcaagaccctgtctcaaaaaaaaaaaaaaaaatgtgtctgggaagaagagatagtgaaaagagggaaccaaattaaaagaaagaaagctggctgggtttagtggctcaagtctataatcccagcactatgagaagctgagccagtaggatcacttacggccaggagttcgaaactagcctttgcaccatagggagacctcgtctttacaaaaaaatgtatatatatagaaaaattagccaggcttggtggcacacgcctatagtcatagccacttgggaggctgaggtgggaggatcacttgaccccaaaagttcaagactgcaatgagctatgaacacatcactccaccatggatggcagagtgagatcctgtctcaaatttaaagaaatttgaggctgtctcaaattaaaagaaaaaggaaagctggggaagagaaggagactctaaaatgatggagagaaagaaaatctatcaaggaagaagcaaaagttagcgaatgttaattgcaagggaaagatagcccttgagccctcaacattccagctcctcctcaaaaaggcccttctcagaaggctctgggcatggtttgtcctcactgacagtcctgcctgcttgtaggtagaagaagatgggaacaggtgaaggcactacggctgcacacttacacatgtacatgatacatgcaaacagaaatgcaccgtgggtggaataaccacagacagaggcaggcaaactcagctcagtgagcctgcctcccttctagagcaatgcttctcaaactctgacaagtgcgttagcatcccctggagggcttggtaaaatacagaccctgggtcctatctgcaaagtttctgattctgcagtggggcctgaaaatttacatttttaacaatttcccaggtgatattgattataccagtttagggaccacattttgagaatcactgccctagaggttgactgtggactagaaaaagtagagaccaacacatcccaggtgcaccacactgtgtcaatgcacttcaatcccattcggtaggacttgggtgaccacaggttctgtgtaagaccctatgggaggcagaaagaactcagtctgtgcccttggggagctgatagtggaagtctccctcttatacagttatctctgtcctgtagtaagtaatacaatactgtgaaagccagaggagggaaagatggatttagccttgggagctatagggagataaagaaggagaggatgttgctttgtataaccatcgatgactcacatacacgtctcaagagttcaatggaatcagtgaattttaacaggtctttaatgaaaaaaatctcaccaccccacattattaacctaagtctgcttacaaagtaaccataaactacacagctatataattatattgatttaattgataggagatattgttttgacagaactcagttaccaaagtgtgaatgctgtgctgctttggtatacattttttaaagttcacacagctctacagctgggtgacatgaggtaacctacttccttgtgtttttctattgaaatcactgtgaaattcgtatccttataattttggtcatttagttttctcttgtgaacttgtcatttatcattaaccccacatccattattttcttgttcacctgcaactgtgaaattatgccctttggttacagacacaaacacaggtattgaaattgtgtggctttaactagattataaggtgatcattcacttggcccccgtacgtttggtatagatgggtagatagatgaaaacatcaatgtgaaaatgcagactttaaaaatgcctgtggaaggctaggcacagtggctcacacctgtaatcccagcactttgggaggccaaggcaggaggaccgcttgaacccaggaatctgagaccagcctgggcaacattgtgggaccctatctgtataaaagttacccaggcgtggtggtgcatgcctgtagtcccagctactcaggaggctgaggtgggaagatcacctgagcctggggagtcaagactgcagtgagccatgattgtgccactgccctccatcctgggcaacagggcaagacgctgtctcaaaaaaaagaaagaaattccacagccgggcgtagtggttcacacctgtaatcccagcactttgggaggccaaagtgggtggatcacttgaggccaggagttagagaccagcctggccaacatggtgaaacccagtctctaccgagaaatacaaaaattagcctggcgtggtggcacatgcctgtagtcccagctactcgggaggctaaagcaggagaattgcttgaacctgggaggcagaggttacagtgagctgagatcgtgccactgcactccagcctgggagacagagtaagacactgtctcaaaaaaaaaaagaaattccagatagaggagagggtaggagggggttcagctgaggtgtagcaaatagatttgactggaacaggaacagtgtagtagagataaaggcaattctgtaagagtagggagaaactacccaaaggccttcacctatggcaggaattgagatttgaactgagggaaagttgagagcagcagccaacttcaaagcaaggaagagatgtgaggaagaatgttaggaatgttatttgtgctcctgggtgacagattagagtgaagagaatgtgaaatcaaaggaagctttgtgtcaatggaaactagatgtcagctttgagcaacagggttgtggagggatggaggtgtggagggaggtccctcctgacttaatgacacacttgatcaggaagtggagaaggggcagaggctgacttggacctgggcatctgggaacagagggctacccaacaggattggaagtcttggcaggagtcatttgagctcagggaccactttatctggctttttggatgatgtcacagaccgtaagaaatatatggagttggagatgatgtgagaagtgaatcggcatttcacctacttgcatatcataatttaagcaagtagatgtctctaaggaataagacagtagataaggaacatcttaggacttctggctgactttgtctttttgtttgtttgtttttttaatagccatggttcacatgttttgaggaactgttacctcagctttgggacctttctaaccatctcttccccagatctggctgtttttagggggattctcatgaatgacatacatagttgactaaacatttatctagtgttctactaaggtcagacaaatgcaattttgcccagatttctacactagaacaaactggctagagtgaatttttctgctttgctttctagaaatttgtgaaaatgtgtccttgttgtccatgaatcctgattttaacttgtcattgtttcttatgttcagatgagacctgccagagccaaatttgactttaaagctcagacactaaagtaagtgccaccagttatatttatttgtctttttagctgcctttttgaaacacagcagtttgtttgtagagttggagaaataacaattataaaaattgttgttaaaaaaaaaagaacaaaacagtagttcatagagtttgctatgtgccaaacactattcagagtactttgcttatgttaattccttatggagtgggtgctgtgatgatccccactgttcaaatgaagagaccaagagactataaggttaaggaacctgctcaagctggtgtgatagagttggaattcaaacctaggcagaggttggggtcttataccctgccccaccctgcctcctcctatgtagtggctctatttgctcaagtggtggcttgatctgacccatcttttctgtggaaggatctagaccagtctctagggagataactttacccattttgctacaacatcccaagagattaaaatcttacatgaacccacaggagactggcgtttctcttaagtgtgttcttcagagtgctagccctgtaaaatttttctcaaaaagagagttctgttgtagaatgagttgggaaacactgcatgctctatctatacctcccacccactttgaagagatactttgttgatgacatattaatagctccagaagtctttcaagaaaggaacctgaaacacgatttgggagatgctaccaaagactgggttccataaggaaacagctggctttttatctaataatggatttaaatagtccatgagttctcattggcagctaaaagtacaatggtcagtggccaccccattgtcctgcagatggatggttgtgcatctggtgatcagagggagagctccctgtccttagatgctgggaaatgctgtgtggagctaaccaaccatggttctgatctcctggatcacaaaatgagtgaccaggccacagtgtctagagcctaggcacaaatctggtatagttgggtttgtgtgtattactccagtcctttagttggtcagctaaaggaggtggctgtgtaatatactgcaaagattgtgggctttagagtcaggaagccctgtgttcaaatcctgactatgccacttactatctttgtgactgtagtgaagttatcaacttctcccccactcaattttctttatctgcgagataggggtaaaaatgcctctcttgcagggaagctggggtaatacctgtaaaacattttgcatagtgaccaaaatttaatactcaaaatatgtcatcctcttcccccccttttttttttaaaccagaaaggataacagagatatataaattaatttgcaatttaattaatacacttatttctttgaattgaggagtctttgtaagatttattaaatggtatagtgatgataatattacattttcccagatttcataaagagtcttaaaacaatttttttttagagcaaccctgtcaaatagaacaggtgagaaagcttagatccacagaaattgtcaccttttatcaacattgctaatgccggagagagggctccttcctcctaactcagtgttttcatcacgacatgctgcctccaaaaaaatgtccacaaaatttagtgaaaaaagtaaattctagctccatggtcttttaagcccttcagtcacttggttttacatttcgccatagtcaattactcaaaaaagcatgctgtcggggccaggcgtggtagctcacacctgtaatcccagcactttgggaggctgaggctggcagatcacttgtggtcaggagttcaagaccagcctggccaacatggcgaaaccctgtctctaccaaaaaatacaaaaattagccgggtgtggtggcaagtgcctgtaattccagctactcaggagtctaaggcatgagaattgcttgaacccaggaggcggaggttgcagtaagccaagatcatgccactgcattccagcctgggggacagagtgagtctccatctaaaaaaaaaaatagcatgttatggaatacttggttcaacaaagttaaacaagtttctttccccctggccttctcagggcctctgctgtgctgatgtacaccgtgatgctccaaaaaagatctaaagcgaatcatatttctcaaaccctctcaccagcagtggttctttgggagctaggggtatagtccacagcagtggaagaatggggccccaggtttcccatggtagtcttccatcagctacaactacagacccctcagttcgtctctcacacacaagtgggtcctttgcttaatagtaggaccattatgctcccatccccctccacagctgcgagatacttagtatagcagaatcaggagcctgcagatctccataggggtgaatatgctgagggtcttgctcatctatgtgcctgtggttggggatgaagggagggggaattcgtaatgccccccaaagagggctgtggcaaaaatgtggcccgagacattccttctcacagagacaaatgtccatatcccctttacggacctcttgagagttagaatcctgtctgctaatgtgagacccacaaaggttgccttgtgcttttattcagcacagaactgactttctgtagttttccagatgtgccctcattgttcggccagcacccctcacataccgtgggacttcctggcatcctgcaaagtgagcacaccccttccaagttacaattggagacctttccatcctattggtttgactcaaatgaaaaagatctaggtcattttttttttaattcaagaaaatgttacaattttaaaattatttaattcaagaaaaagttataagggccaggcgcggtggctcacacctataatcccagcactttgggagtccgaggcgggcggatcacctcaggtcgggagtttgagaccatcctgaccaacttggagaaacaccgtctctactaaaaatacaaaattagccgggcctggtggcgcatgtctgtaatcccagctactggggaggctgaggcaggaaaatcgcctgaacccgggaggcggaggttgcggtgagctgagatcacaccattgcactccagcctgggcaacagaagcgaaactctgtctcaaaaaaaaaaaaagaaaagaaaaaaaagaaaaggttataatttttatccttcttttttcattttgtttaaaatttgcctttgtctcatttttttttttaaagagtcctggttaaaaattaacataatctgggccaggcacggtggctcacacctgtaatcccagcactttgggaggtcaagtggatcttgaggtcaggagttcgagaccagcctgaccaacatggtgaaaccccgtctctactaaaaaaaacacacacacaaaattagccaggcgtggcgcctgtactcccagctacttgggaagctgaggcaggagaattgcttgaacctgggaggtagaggttgcagtgagctgagattgtgccactgcactccagcctggtgacagagtgagacatcgtctcaaaaaaaaaaaaaaaaataataataataataataacatcatcattattgaggcaagcaaaggaatggatatggaaacgttgcaaaggggtacaaagagcatttgaaggaaaatctacttttctttccaacatcacttttccatgtttaaaagcaaaggaattaggccaggcgtggtgactacatgcctataatctcagcattttgggagactgaggcaggaggatcacttgagcccaggagttcaagaccagcctgggcaacatagcaaaaccccatctctacaaaaagatacataacaattggccaggcatggtggtgcatgcctgtagtcccagctactcaggaggctgaggtaggaggatcacttgcacccaggcggttgaggctgcaatgagctgtgatcatgccacttgcattccagcctgggcagcagaatgagaccgtctcatgaaaaaaagtaatggaattaacatttattgagtgttacctacctgtacaacaggcaccatcctagctgtttatttttaatttgttgaagcattctccagcaactctgagttagctccaagttcagctaaagaaacagtgtctcagattaagtattgtgtccaaggtcccagagctactaaatttcagaactggattttggaccagatctgcctaacttcagaacctttctactgcatgatgatacaaagatagatggtaaaatggatgggtggacaaatggtgaaattgatggaatgatagaaggatatcaatatatcacaaataatttgagggcaatttaaagcaacgaaggcatgccctgctagggcgtagaagaggatagtgaaggtatccaggagacgttttgtttaacaaacatcagttaaggcagctgagtgcattgctctgtgttgcataaattttctgagcataagacaacattcacaaaaaatgcatttagaaaaccacaacaaattaataaggcctctgagcactttcaagggctagtcaatttgaatgttaacatccatcctgcaaaagagtggaaaaatgccaaatgtgatgtaatttcctgaatagtggggttcttacttccaaatatggaggcccctctctggaatttgtaccctttgaccccacttaaaagtctccttttgctacaaaactgaagtgtcttaatcttacacatattgaaacatctgctaaaatgccgttgaccttctgtcaacagggagcttcctctgcagaagggagatattgtttacatttataagcaaattgatcagaactggtatgaaggagaacaccacggccgggtgggaatcttcccacgcacctacatcgaggtaccgcagcctcttttctttctaaggaaaagcctgacagtgcccaaagcaccatttatttaccaaatgcttatgttttgtttcctccttttcctcttgtttccctgctttcttctcttcccttgttctcttttacctctttccctttctcagcttcttcctcctgctgagaaggcacagcccaaaaagttgacaccagtgcaggttttggaatatggagaagctattgctaagtttaactttaatggtgatacacaagtagaaatgtccttcagaaaggtaagctgcacttctcatgccttgctttggggctctcttggatggcgcagctatgtggggaagcgtggtgttgctatcacaccccagtctgggggtgctgtctgtacccttaagagaagtatgccaatcaataattgcattaagggctgggcacggtggctcatgcctgtaatcccagcactttgggaggccgaggtgggtagatcacttgaggtcaggcgtttgagactagcctggccaacatggtgaaaccccgtctctactaaaaatacaaaaattagctgggcatggtagtgggttcctgtaatcccagctattcaggaggctgaggcaggagaatcatttgaacctgggagacagaggttgcagtgagctgagatcgctccactgcactccagcctgggcaataggtctccaaaaaaaaaaaaaagaattgcattaaggcctgtaatcccagcactttgggaaaccaaggcaggaggctcgcttaaggccaggggttcaagaccagcctgagcaacgtagcaaggccccatctctactgaagaaaaaaaaaaaaagaattgcattaagggcaattggagaattttctgaggtaaggtatttttaaaataaaccctaggctaatatcagggtttaactatattgagctcactgattaaacatagtatttctggagtcttagacatcttttataagctgttttcaaccaacacttaccaactaatgatgtcataatgcattgtgttggggactgggttttacaatatattggtgtgacctagtggaaaaaacaggtccattgataccaggagaagtttgaaaagctttgaacccaaaaggcacaaaccaactacgcagaatgtgggagttaaatactttttccaagccaccattttcttatagaaaaaaaatgaagatagatggctctctcctaggtggttgtaagaggcttcggtgaaacaacttatgtgaagcccccagcatgacacatggtatcttgttggtgcttagtaaacaggagatgccagtattattattatcaccatcatgcttattcagaacataattacattgtgcagagaagttgttctttccagaatccaaacactctacatggcaaaattctctggcttgctaaagttactaagttactgattttattgaggcttgagggaagtgagcacattgttagaaaaagcactggaagcaacccagttgcccaacagcaggggatcagtaattaaatcattatatgtgtgtgcgacagaataccctgcagtggtccattaagctatgcaatgccattaaaaatctagaattctatttcttgataaagaaggaggtttactatgtgctattaagtattttttaaaaagcaagttggaaaagggaaacacagttcatactcaatttttataagaaaaaatatgtgcaggtttaattcacatgcatagaagtaaatctggggagtccatatgccaaatattaagtgtttatccccaaatgactatgtgatgggtgatgattgttttctgctttacgtttgtgttctgatttttctataatgatacattataagtatctataatgctacaaaagaaagaaaaagtgaaaccccccaaaatctttgccttagaaatgaagattgggtatctgtttcacattaaatgagtcaaaaacactacatttgttccctggcttagggacacaaatctgatgttctcctttactaaaatacttaaagaaccaagctgaacttcccagcatcaagatagctcctctgccattagcatcctcatcccagtggtgttaattccctccaggttcagcagggaaggtttttcctgagctaaggatgtgataaacaatgcaggacattgaagcatgcaggcagaggccccaggcatgcagaggcatgctaggacaaggaccctctctttgctgtgtcttccagggtgagaggatcacactgctccggcaggtagatgagaactggtacgaagggaggatcccggggacatcccgacaaggcatcttccccatcacctacgtggatgtgatcaagcgaccactggtgaaaaaccctgtggattacatggacctgcctttctcctcctccccaagtcgcagtgccactgcaagcccacaggtatctaagcttctcgtcactggttttcatactcagcatgtgaatttttgtagtcaacagtgctgatggcacacagcctctctggggaggtttttgagcactgcaattaaaaactgtctgcaggaggccgggtgtggtggctcatgcctgtaatcccagcactttgggaggccgaggcgggtgaatcacctgaggtcaggagttcaagatcagcctggcaacatggtgaaaccccatctctaccaaaaattcaaaaattagccaggcgtggtggcgggcgcctgtagtcccagctactcgggaggttgaggcaggagaatcgcttaaacctgggaggcagaggttgcagtgagccgagatcatgccactgcactccagcctggacgacagagcgagactccatctcaaaaaaaaaaaaactgcaggaaagcagactgtacactggactttgtctttatgcatacaaatggccttttccagtgcttggttgcagatatatctcaagggaaaaggaatagtcaagtaattgctctgggaataaggtgactagggaaagagaaacagagaaacaagagcctttatcagttggcccctcttgggtgaagctgttggtgtgggtaccaccactgtgtcataaatcccatggtccaaatgcggtcctcagtcatcttggccaaagttgacctgcagaagacaaaggctgaaagagagacttacaccttctcatcagccatatagaccagatccaaagtattatttgcattcactggaaccaggtgattggaacaagtaacttacagcatctcagtctctgtgggctgaaaggatataggtttataggcgtaataagatgttggctttcccaaacattaattatgaacaaacttgtttagaaatataaactattcctaactgatccccactttcccaaagccaagaaaatgtcagaaccttgagttcagggtgacacggtgggggtgacatccctgtgaaagagcctggacaaaccaccatgtatgttgtaaggaggttggcagaggaacaagagtaggacctgggggcccaggttgaccctgagatggtgcctcttgtctggtcctctaattgtttcctcctctgccacctgctcatcactgaccccagtagagggttcttggcagaaagcattaaacgggctgacccagggcttcctggacagtgatagccgcatcctgttgtcttataggacagagtgtgtgactggagtgggacattcttctttgtaaggatgcagggaactcaactacatttttcacttgactagccaagagtgattgtaaaacaaaactagtacactactcatactcctctctggaagactctgctgagctcccagagaaaataaaaccccagggaagggccatggcagtgtggggccacctttccccgtatggttccgggtcagggatctggatgcacaggggctgggttggctgggatggggagcttccaatgtgtccctttgaaaatctgattctgcaaagcagggcggcctcatccgtcactactctgacgggaacctctccccatctccacacctctcactgcttcctccaccccctgcctgcacacatcaggatcacgctcgcacatgctcaaacgcacactcacccatcctggtttctccccagatgtaacctgaggatttcctttttggacaccagagtgtccttgctcatcctctccatttcattcctctttatataccccttgtgattattttccttctttttcctttatgctgacacttgtaccttttgcttctttcttttgttttcctctcttttcttctttttaagttttccagtcacagcaagctcatcacgccagccccctcatctctgccccactcccgccgagccctgtcccccgagatgcacgctgtcacctctgagtggatctcactgactgtgggggtcccaggcaggcgttctctggccctgaccccacccttgcctcctctgccagaggcttctatctataacactgaccacctcgccttgtcaccaagggccagtccctccctgtctctcagcctcccccatttgagttggtcagatcgtcccaccccacgatcagtagcttctccactggccctaccttccccacacaaaacctactccctagcacctacttcccaggcctcccttcacatgaatggagacggtggtgtccacacgccatcttcaggcatccaccaagatagcttcttgcagctgccgctggggagctctgatagtgtcatctcccagcttagtgatgcctttagcagccagagcaagaggcagccatggcgcgaagagagtggacaatatgagaggaaagcagagaggggggcaggcgaaagaggccctggtggacccaagatctctaagaagagctgcttgaagccttcagacgtggtcaggtgcctgagtactgaacagagactctcagatctcaacacccctgaggagagccggcccggcaagcccctgggtagcgcttttccaggaagtgaggctgagcagacagagcggcatagaggtggcgagcaggcggggaggaaagctgctcggagaggtgggagccaggtaggactgcagcatgccgcgtgtgcacttggcgtctcacttggcagggtgggctgcacgtctcgcccctggtccatctacggaggccaagtgaatgctggtgagaccatttgcttgcctcaggagcaaagagatggccccagagggaatgggaggacatgaattcaggtgccaggactggatacagttggagggaaaggacaggctatatctggccacttgaggtcatttggaagttatctctactttgaatgcctcctggcctgctgcaagggcctctgagaaggcagaccttcctcacatcccatgtatgccttagagatgaccctcagtttgctttgactaacacagctgagaacaccaggctttggtgtggtgtggtttgcttttatgtaagatgcactttgtttccataacccatggtgctctgctagtgctcggctctgtcaggtctttgtcctgtctcgtgtttgtgtgggagcgcggggcctttgtttgctatgaaacaaaggtgttttggttctggagaggagaatgcaggtctcctggggccctgactgacatggggtatcctcgaatagccatgccaggttttggggtgagtgtaccatcttctctctgggtcagctacaaagacccagagagcatttggacaaaggtagccttagggtgttttgagacctgaaaatttttttggagaaatgaacttagcaactaaacaaatcacaattctgattttggctatgctgttgactactgcgaaagtcaaagactttcggcaacttctcagaagcaaccaggtttgaatgccagctccacctcttacagtctagtgacttgggagttgcttcccctgtctgagactcagtttcctcatctgtaaaatggagatgatagcacctacctcaaagagtggttgattacaagggcttatgatcctgggaacatggtcagcactttataaacggaagctatagagccaccatcttgggtgatctagaattgcttctagaactgagaatatttttagaacttccttagacccagattgagttcctgaagatgtctccaagccatttattaagtatctagtatgtctgatgtccacagtaaatagtgcttaacccttaggcttgcaacctcagtttccctttgaggctgtagttattcagtctatgaataaggcctgcaggtaccagcctctgggcagaatacaaaggtcatttgtctctcctcttgagaaccctaagttcaaggctcctcaaaacaaggaggagcctagcaatatcaccagggcaataatagaggcatgcttgggggacacaggagcacagaggcttgagacacactaggccagacttccagctccagccaagcacatgtgggcccatgggtgggccagcacatcaggagtggggatcactgagggtgagccggcatggggcagtttataagaaatcaggcttagccttttgctagaaagccacttaacctctcacatgctaagcaggagtggaagcagtccatcccttgtagggcagtcataaggattcagtgaggtaattcatggaagtcggtgcttggcatgtgccaaggctccatatgtggggtcacccgctgctgtggagggctgtaggaaagcagtaatacctggcaaaggctttgcctggccctggaacaggttgaggaaggaatagaagagatggtgaagtggctagttgaaaagaattaaacgtttctgacacaggaacaattctataaacattctaagtcaacccaaggcacccggggacatccttatcgtcagtgttgagtcatcatcccggcccaattccaggatcctgtgtgtataggaagtgcgcacggtgccggatctccgagtaaggttaggggtatacgcttcctgcttcctaaggcaggataggaggggagtagctggcaacactgaagattatgttgattggaaagccaggcttgttgaaacttggtgttcctttcttggtgggcctccagaccccaagtgtaccacttcctgtcccctcccttcctcctgccctcctggcacaagccccttctccatgggtgtgcacaggctgtggcctggggctcgctcccccttgagagctggcatttgtgtgaaaagggctgctgcccacacctccccttcagccccctcactttcccctcctgtggctggagcaggagctgacaactctggaaacggggtccttcagaaggggctcctgtgtcttgggccccctttgggtgacagacatgctaaaaatgggaaggacttgtatgacaactgttctctggcagccccatcaggatgacgtgaccacaggctgtgttgcttatttggaaaaatgcattccagaccagtttgtgtatcaagaaaattgtcagccattattctccttgctgaactaaagagctgaaacaaaagttcacttttattgtaggtattggggaggtaggttgagaatctgaccaataatgggagggaattttacctgagaaccttaaatgaaaagatattctgaaatgttatgatcatttattctttgaagcatttaggatattccaggtacttagctgcaagagatagagaggggtgaacatcatcagggcttccatttagatgtaacttctaggaagctgttggggccaagggaaagtttccctcttatccttgaagtttccctaaaaattactgacaagaagcaaaaatttttttctttctttttttttttttgagacagggtctcactctgtcacccaggctggagtgcagtggcacaatctcattgcaacctctgcccccaggttcaagactccttcaacctcagcctcctcaagtagctgggactacaggcacatgccaccatgcccaggtaatttttgtattgtttggtagagacggggtttcaccatgttggccaggctggtctcatactcctgacctcaggtgatcctcccgcctcggcctcctcggattacaggcatgagccaccacgcccggccaagaagcaaattaataggagaaaaggcatacagatttattcgatcatagttttatgtgacacgggagccttcagaatgaagacccaaccaatggggtgcagaagcttataccatcttgaggttacagaagagtgggggctcagaggatggccaaagacaggttatggtggtaaatcagattttaagcagcaagacacgttatgggagggagaaaagcaaggcttggctagcaaaggggtcttgttatttagatgaaagctcacaggtagcagcctcggagagaatagatggtaaatgttccttttaggcctttaaaggtgtcagactgccagttaatcttttctagatctagacaagggaaagcctcagagaaaacctggctgcatcaatgcagatttttctctacaaatacaaatctcctgcacaaaagacagctttgcagagctacctctttttgctggctctctgacagccatgtcaaaatatgtcaaaaaaatatattttggggtaaaatattctgatttcctttaacacctttcctgacagcctcccccacccctgcatgagtggattagtgctctgactttgggctgccatagcccctgcaatggtctgtgtgagcctctctcagccccctttgcttccctgtgttcccatacagtatcagtgctccaaaggcgggaccgtgatacctaatgtatggaaggcacttcagtgaatgtttgttgaatgaaagaaaaggcaagccagacatggtggcttacacctgtaatcccagcactttgggagcctgaggcaggcggatcacttgaggtcaggagttcaagaccagccagcatgacgaaaccccatctcttctaaaaatacaaaaatctcttctaaaaaaatacaaaaatcagctgagtgtggtggtgcatgcctgtaatcctagctacttggtaggctgaggtgggagaatcacttgaacccaggaagcggaggttgcagtgagcagagatagggccactgcactccagcctgggtgacagagcaagaccccatctcaaaaaaaaaaaaaagacaaacaatgactgactccaactaaaggagtttaggatcttcaccgggggagtaagacctgttcccaaatagttacaatgcaaataaggaaagagagtcacaaacagtacatcctggaagatcaagatggggagaaataataaccgggaaggaaggtggttgtctggagacttcaggaaaaaaaaatgccaggcagggtgtcagagccccagtatgaggaggtggttgacttgagtgttggtaagaaaaattgactgataacagtatagatttgaagaaggcaagtttattagaaagaaagaacgctgcaaaagggtgcagcagggcactcagtgagagaggactgagcgcactgaggtggattttccttaggagcatttatggaccttaaggcagaagcttaagggcaatttggaccatactggccacataggtcatgatacatgattacatctgtagatgttttggtgccttaacgtcagcaagggttgcacagtgagtttcagcatgccattccagagatgtgtagaaattctagttacttataaatttggagggaaagaaatctgggaccagatgcctgctttaaatgatagggaagtctaattacttctaattttcccagataaggaatttggcctgtttgatggtcaccaggtggtcattgctcccttctaaattcctcagataaggagtttttgcctctggggcttgctggatggtcaccaagtgattttgctctcctcaaaaaagtagcatttaatctgagccttaaagaataagaggttttctcacagatgtacagcaggagggtgggactcgaggcaaatagctcaagcaaaggcccagaggtaggaccatgaaaggtgtgcatagagaatgatgcattccttgtttgggtgaggcttctggtgtccacaggtgaatagaaaagggggtttctggagaaggggctgggaccagaagttatgtcaggagtcacggtgaccctttgaatcagtcacctgcccacctccctcaactctgcagatgtgtggacacttcctgtgaaatggtttgacttttcactcctaaactgtttcacattgggtcagttgcccatgtttttaggtgtgttttttctctgaacagcagaagagagtgaatgaaatgaatgcaggggtcttcagggaaatcaggatggggtggggaagagcactggattgagagtcagggtcccaagttctagctctagctctgccattggcttgccaagtatcttttgttgagtcacttctctttcctggcagctactctgtccgtaaacaaaagattcagacaagagaaatgccattctttttagctttgatatcctttgattaggtaaaaatcctgcatgaattttagtttaaatgagaaagaagaacacatacaaaaatttaagtcaggggtttattgtcaacttacagaccttcacaatggaaaaatagaagttttgccttttagtttttgttctgagggacaacttaacttattggatgaaaaatgtgcgtacaaaatgcccaagcagtcagaattatcaaccaagttcttggattttcttgggcgcaattttggccaacaacatttagaacaatcaagaaagtaggctggggcgtggtggctcacacctgtaatcccagcactttgggaggccgaggcgggcagatcacttgaagccaggagtttaagaccagcctggccaacatggcgaaaccctgtctctactaaaaatagaaaaattagccgggcgtggtggtagacatctgtaatcccagctactcgggaggctgaggcatgagaattgcttgaacccaggaggtggaggttgcagtgagctgagatcatgccactgcactccagcctgggtgacacagcaagactctatttcaaaaaaattttaaaaagtaaacaaaaaaaaaggaaagtaagggggacaggtctgatggtagtgagttatctcaattcattgttcacagtcagttacagatcaaactggttgttccactaaaaaaaagaaaaagaaagcaaagggaagatcatcttgaaaaatcccatcgtttgcatgatcaaatatttactgagtttctctgtgacagaagcactatttgttgactggcatctagccttggtttttaagtgtttttacaaattgtgagagtacttcctagaatttttgaattaaagagaatatttagagaccatctactccagtaactgacaactttttctggatcacagaacctttgagaatctgaggtcagccaaggactctaggccagtagtttggggaggagagtgacacacagttttgcatcatttcaaaaggcccacacccaagtctacctgtgacagatcaccaggttaagagcctccagtcttttacaatgagatgaggaaaccaaggcctgaggaaagtgacagaaattttgtgatgtcagtttggttcctaaagggaaggaagctaatcaaataaaatctcaatatactggaaagctatgtgtccttaaagcatctgtctgagaagcataagaacaaactataggcttagagaaaggagaaggagggaaagtgactcaacttgagacagaaagatgtgacttcagagggaacacttctcaacacaaggaaactaaattagttcccagaaagataagaacagaggcataggcctgccttgaggatggaaatcagaaatagaaaaggaagctgtgatggaacctgcaagaaaaaaagaaattttaaatgttaagatactcaagtaaatataggaaacattttcctttgactcactcagaagggaaatctctaaatagagggcgtttaacagcttacgggatggggagagacgttggctgcggtacttacaaaaataagcagcaggtattctctcatcactaacggtagggaactggccaggcacggtgactcacacctgtaatcctaacactttcagaggccagcacaggaggatgtcttgagctcaggagtttgagaccagcctgggcagcacagggagactacgtctctacaaaaaaacattagccaagtgtggtggcgagtgcctgtggttccagctacttgggaagctgagatgggaagagcgcttgggtctgggaggtcaaggctacagtgagccatgatcacaccactgcactctagtctggacaatagaaaaaaaaaagggtaagggactaagacccaaagctaaagtgtctacccttataaaggtgttaggagaatggagcatgtcagtaggaagtgccagccacagggtactggacaaattaaggtgacctgttggtgagcatctctctctagctcttctgatatcttcctctggcagagcacaaacctagaagtttggggtgtggtggaatgtgcagaacttggagtctgagagacagatgttccaatactaactgttcacattcccaattcacacacggcaggtcttcgttttctcatttgtaaaatgaggtcaatgttgaccaccttcttgagttgctatgagaattaaatgaaatataatagagatgaaagcagctagcgcagcctgtaacgggaccataaatacctgttgtgtgatgtcgaggtaccagggaaatgaaacaaaagtagtttactttatccaccttaccctgttccacctaagagagaaaaatggtgggtggggaggatgggaagagaagaaaatagagaatgatgggaaaatcattttactttgggttacacaaatcgagaatttagaaaatctggaatttgtgctccccaaattagtttattctaccttcagtataaaggcataagctattcttggaaagcctttggtttcttcacacttgaatatgtatctgccattaccccccaactgtcttatgaaaggaagagaagactgtatgatagtctatgaagagaaggctgagcattggttgagtatttactgagcatttaagtttagtgttgtaatcagattcaaattacaacaaagttaatgtgttgtctagtgagtgacttgcaaggagataaaatctagatggtaagcaattgaactagttgtttgtaattagttttatatttaagctgtgatctttttctcagtaaactcaataagataactcagtggagtcagagactgttttgagggtgctctggtggtttcctggagctcaaacccaggagactgactcattcgggcctttctactcctctggaagagtttgcccatgatgttccagtaggtgcaaatctatcactattttggggcagtcgcttgggatacttccagaagtgagcactccatccatatctggaggctgcagtcgaaagccttcctcctcccagtcttcagtaagcaatgagtagagtgctgcctcccttaagccaagtcagcccctacccagtcctacttcttaacccatgggacaggcacattgcaatcatagagcattaaagccaaaaagacatttatgtaaattatgtccaatcctcttatgtattttagaacttgaagtcctaagacgttaagcattttgttcacaagacaatcagttagtacagagcatggcctggaacctggattttctcactgtcccgctgggaggtcagggtaggtcaccagaaaggtggggtggggtctgagaagacttgggatgtgagatgactagaggagtgccatctctgtgagactcaggcaggttaggggagcagcagagcctcgtgctgtttctagaggggatttggggccagggagaagtagagtttctctgtcctgtccacatcttcaggacttcctgctgttctgtagcctgtgtgcaatctatttgggcccacaaggctttggcacacacccaaagctggaagcggatgcttagtaactccacagtagcgccaggtgttctgtggatccagagggattaacagctccagggaggctaagatctgatttctgggggatttctgtgaactgaaagtagaagggcaacagcaaggacgcatgcagggtcacccacttgaggagaatgaagcaagctccaggccaggagaggcgacttgtgtacaaatacagaagaaagcactttctggatcaaggactgtcacctgcttcctattaatgggggaaaggaggggagtgcagtgtgtgtgtgtgtgtgtatgtgtgtatgcatgcgctgggctggttgtttttgtaaacacgtgaaaaactggaatgccgtcaccagagttggaaatgtccttagcattttttttttagtcttaactttattcttttttattcttaacactagatgaagtccttgttagaacttgtatcttctcttaggcttaaataagggcagatgctgagtacctggggagggctcagagaggcattgtctagtagaaatataatgtaagccacatgtgtgattttaaaatgttctagtacacacagtaaaatggaacaactgaaattttaataatatattgtaacccagtatatctaaaaattattactgagattttacattctttattttgtactaagtttttgaaatccagtgtatatttttacacataacacatttcacttcatacttgccacatctcaagtgtccaacagccacctgtggctgctggctacaatcttggacaggataggtccagaagaagcactgtacaaagctgtaaagtggttagaaaatggggacaggaaaagaaaacataactagaggggaaaaaaaacctgaggataaacagccttcaaaatgaagggctaattcttgtgatagatagtaatggtttccatttccactgagggtgtacccccatgccatgtctccgtcccctgaaaaaaactggtttacatttcagttatatgagctatttcacttaaatctaaacagagagaaattgagtcttaactaatagaataaatgtttatcttgccttcttccttcatttattcaacaaacgctaagtgaggcacccagtcatccctacctctcaggaatggggttaagtttgtactatacagatgttaaagctatgatgatgattatccttagctttgggcatggcctgagaccaaggaaggtacaaggtggaccatcaatgtcccttccggtactatagttcacaattaatgattggacgctattaccgtacaccgtatcttttacataaggaaatgtctttgaacacctagagtaaaaagtattcaagaagagaaatgatagatagtgcctgttttcagacaaggcagaaattgggtgttgctgtcatagttacacaagcaatctaatcatgatccaagagggaggtggcaggtagtatatggagattagatgtcaaagggctcagctttcacactaccttgtacaaacttcacaaggtcaggtcccagccacctggcaaaggcccaacatcctgagacattgtagaagaagcatgaaatggcctctttcgttttgtctcttcctttacccctgtcagagtccgaggtgactgatttgagtgattgcagtttagaaggggtttggagaacttgaagatgcttcccaaaaggacaagagtatagaagtggggtcgggcacagtggctcacgcctgtaatcccagcactttgggaggccaaggtgggcagatcatttgaggtcaggagtttgaaaccagcctgaccaacatggtgaaaccccatctctactaaaagtacaaaaaaaaaaagctggacatggtggcccacgcctgtaatcccagctacttgggaggctgaggcaggagaattgcttgaacctgggaaacagaggttgcagtgagcccagattgcgcctgggcaacagagcaagactccgtctcaaaaaaaaaaaaaaaaaaagaaaaaaaaagaagtagtgcctgggatggaactcctctgagccttaaattccttattctgcactcctcaagtcagagggttagtacaaaagtcagatatgtaatggatctatatatgcttgtaaaatatcaggttcttcttactatatttgattcactgatcctcttttcagcaccaaattgtttgctagataattgattccagtcactcctttgggatgaatgaagttgagtggaaggaggctaggtttctgtaaactatggagatcttgccaagagattgtctacatcctctctttataccgcatttgacctgaggtcatgaggccaccagctggaatttggaaatattttgttttttatgagaacttttgttttcatgaggtgtgacccagaccaccggtcttggcatactatagccaaagaatctcagtgtagggcagttgaggtcctctgcacccttgccgcctacagttggtctgtgaaccagcagtgtcagcactaccaagtagaaatgcagaatttcacaatacagcccaggtgtatcaagtcagagtccacattttaacaggatcccaaataatagctatatacattaaagtctaagaaggatggctctacaatatcccagttagtcatagtccacagcagcctcagcttaaacagctgccaaggcagccaactcatttccacttgaggcagccccttgtattgttggattgtttggaagttctcccttctgtcatgttaaaatctgcatgtcattgtcacccactcaaggtgacatttcagacgtttcattcttctgaaagcccacatagaaggtacttggaaatgtccatttctttcctttgtgatacggacaccttaatccagaggcagtgagtggagggtgggtggtgttggagccatacaaggtcggctcccagtcacccggcaaagacctaacgtccagagtcattgtagaagaagcatgacgtggctcatttagttccgcctcttcttttactcctgtcagagtgcaaggtgactggtttgagtggttgcagtttagaaggtttttggagaacttgaggaggcttcccaaaaggacaggggtattgaaatgatgcctgcaacggaagttagtcctgcagggcttgctaacggttgaggacatttccaggggaggtgaacaggagagggtggtctggtggagcggaaagagcagctgagccactttacctcttactggctgtgtgatgttgaggaatgcatgaaacccctctgagcatcagcttcctgggttttttaagaaaacaatgataaaccctgtcctgcctgactccagggtttctgagggagtcactgaagatgaggtcagtgagcacacttgataaggcagaagatggtctgaggataaaagacaaggtcagttgggacaatagatgaagccaggagaaaagcctaccactgacttgatgtgtgacctcaggggaggctcccactttttctatgtctctctgtgaaacaagtgggtcatgcacaaaagatttctaagcgcccatctagaaggccctggagttgtggcctattgctttatttttttatttttgagacagggtcttgctttgtcacccaggctggagtgcagcggtgcaatcatgctcactgtggcctgaatctcccgggctcagttgatcccaagtagctgggactgcaggtgtatgctgccacatccagctaatttttgtatttttttgtagagatggggttttgctttgttgcccaggctggtctccaactccccggctcaagcagtcctcctgccttggcctcccaaagtgctgggattacaggcatgagccaccatgcctggccagcctgctgctattattgcatgttacctggaggattttttcaaggatggctcttcagggtatttatttagaaaaacttcctagagcttggaattgagtcctgtctgggggacatggttccaaacactctccaagtgaaggctggcctctacaatggaagccccactcaaaaggcaggtttgcttggccatgtttgcacctgtgtttctatgttagcatgtggtacctgggttggtaagtgaagagtgacagtttcgtcacacacagtcctatttctggaagcaagctctgtcctacaagctatctgaattcatctcatacctcactggagtgtgtcatttgcagatttttccaggggaatggtcttggttggtacttcatatattaccaaggaagttttcaaaaatgttattccctttttcagtttttataagtttctgaaatacagcagacttgatggttctatgggcctgctctgctagagggggcttccagtcaacaaaataaccaaaactggctttgggttcagccaccttccctagatgcttactagctgagcgtgaggggaccaatatgtgtgaagggacctggctaagatggcctttctgagtctctctcctgccaatctggggaccctgtgttgttcatcctcacctcactgcagccatgtttccaatttcccatttcatttcctggatgcttgcttctaactctacatttgcattttcttctgtgcacccaccctgttgttgtggagacttggtggccataggccgccggtatctggtgtcatccaagcgtgatggtgtggtacgtggatttgctcatgcttttattttgaatcctttccaatgtgacatctgctaaaatgtctcccttataatttgcttggtgatcacagctttctcatcattcattgagagcaggaccagatctcacagaatctgaaaagagctatgtggtaagatgcctgttgaataagactgcagcttttctaaagagaatttttactgatccttacttctggaatctagactagagtgatgcctggttaacccacagaaatattatttataagaattctgtggctattgtagtagagcgagatgttaggccactgcattacccccagcccctggaaaaaagcagaggaatttagagacgatatttctactctgcctatatgtgggattaaattaatgtattagtgcatgattggggatacatacttgcatttctaccctaaagtattccatttgtgacagttactcactaatttcaggcttttatgctgctgcctttttttttttaatattcttactaaattccaaattcttctgtatcttacctgtttttccatgcttacgcctggatccctcctgcactccactactggaatatctatttttttaacctggatcttcaactctgttttctccctggacttatgtgcttcgtctggaatgttacatctcttcctctctttcttttttttttgtccccatgttgactgttttattggggtttctggatatctcggggccacctcacaggaagcggtttgcaatgagatcataaacattgccgaaaaatctgttcattactgcagcactgtttctcatccccttgactttcatcacaaggtatccccttctgacaataaatcatctttaatcatttctcagcaacctcaagcccagcagcgaagagtcacccccgacaggagtcaaacctcacaagatttgtaagtactcctggtgaacttcgattctcatgttctcagaggactgttggtcttagaaagtgggtcgctggctgaatatggggcagtcatttgcaggaatgagtgaattacacccaggttctctcctgaggatttctagtgaaggccatgttctgcatcagccaaggtgaaaacaggtggcaggtaaataaaggccgtcatagactgctgggagagagagacaggtaaagattaactgctgtagaatgtcaaatgagagctgtgctgactggtttcagtgctagtatagtgggaatatagaggaaggaatggttaattctgaccagccgtgaatgaaagggttgcttcattcattcattcataaaaaattattggatatctcctatgttttaagcacataggagaaaactctgtgcacagagaaagagagatttggaccaaacactgaaagacaaattagattctgagagctagaaaagggaggaaaatatcttcccagaggtgaggaccacatgtgcaaaggcatagagtgggtggtatttggagaacttgaaagggcccgtgtagctgcagcatatggttcatggaagagatagagatgaagcttagaggtgggatgggaccagatggtagattccagaatgcagttgaagtaagtttggattttattctgcaggtactagggagccattgaaggtttttgaagtaaggaacatattgatcatattttgttttagggagataactctggcaacagagtggagggtagatttcatagatcagggacaaagatgtttgttagaagacttcaatccagctaagaagccatgagggcctgagccaggacaaagtgggcattttgtaaccgtggaagtgagtataattaccaacagagatacatgtaaagaagcctagccagccacagagacagagaagggcaacaagagatgccagtgagggtctaagacgttcactttcacagaacagctacagcatctggtcagcagtgtcacctgccccagagaggccaagagtgggaaatgagaaatgtccaccaggcattttccatggcaactggaaaaatccctggtgacctctgatacggcagtattagtgttggtaggggtggtggcaggtgctgtgttaggaagggtcaatggtgagtggaaggcggggggctatagatcaagggaatagcagagtcaggggaggtgtttttagggtgcagagacaagcaaattttaccagagtaaaatgccagttaatgcaaataagatgtaagtgaggccaggtgcggtggctcacacctgtaatcccagcactttgggaggccaaggtgggcggatcacgaggacaagagatcgagactgtcctggccaacatggtgaaaccctgtctctaccaaaaatacaaaaattagctgggcgtggtggcatgcgcctgtagtcccagctacttgggaggctgaggcaggagaatcacctgaactcccgagacggaggttgcagtgaaccaagactgcgccattgcactccagcctagagacagagtgagactctgttaaaaaaaaaaaaaaaaaaaagtaagtgaaggaagagcccaggaagggggttcaacgtggcttggagaagggacctttctttcctcacatgtgtgagcaggggcaggaaggtgagtggaggcacagagacttaaatctggaggggaggaggattaaggtgctgtccacagcaagcttccatctccagaagtgggggcagagtgagagctcttggctgagcgtggggcaccaggattggcaagagagctgggggaaggaccccatgggacaatgttctgaggagtatgaggttcatcccaaattagagctgactggggtacccaagcagcaagagtgtgggactttgtccagccagtctccactgtctgggagtgaaaatagagaagcagatattggagttatttcccagggctgaggctggcaaagcagccatggtgggagttaaagggcccaggcattctaagaagctggcaaggggcatgtgttgggaggccagtaggagactccaaattgagtaggagacagcaggcaaatacagaaacatgaaaaaaaaaagtgtttatttaccaattggaaattgatctgcatctcttaattcctcatttgagaccttccttctggcaaccagatccatcctccaaattatcaatacatttggataaatatggaaagtgaagttgtccctctggttttagcagagcagaatgaacctcttgtttttgagaactgactccacttgcttgtttctagtctttcttgcttgcacactggaattcattgacatctactggaaatggtagatgactggctcatttacagttttgcctgctactgtcttgtctcaaaatagtaaacagagttgtgaagttggtacatagtaggtgcctcttatgtatttgttgaagaaataaataaaaacaaagcttttccttgatgccaaagcaaggatcagatttcaccacaagcagtccagctgtctccagtggctgctagaacagacaaaacagcacagacccaatgccttaggccaactagcaagtaaataaaaatcttgccctcaatgctcactgggatagaaaaaagaaaaaagctttcaagggtttcagaaaaatgacatccacatttaaaagcagtgaatgaaatgtgtttaggcatgtaaagaaactcaagatagttttgctaaacagtgaggcaattggaatgtacttttaatagcatatatatagctattatatatggctattatacacacactttttttaaaaaacaaatgttttatgttctccatatatatgaccagaatgtaatgtctctgggcccaaataacttctgattatgcttgataatctacatatattatcctgtgttaaggaaaaggcttagtttactttaaagcaggggtccccgatccccaggcactaccacctgggctctgcctcctgtcagatcagcagtgcattagattctcacaggagcgtgaaccctattgtgaactgcacatgtgagggatctaggttacgccttccttatgagaatctaactaatgtcctgatggtttcatcccaaaaccatcccccccaccccaccccatctgtggaaaaattgtctcccacaaaaccagtccctggtgcctaaaaggttggggaccactgctttaaaggcagaggtcagagtagagtaggaagtgctctagataaaaaggcttggctgtggtaaccaaatgaagcgaaataagagtgatcatggcttgcttgtcagaagttctccatccctcagtcttaattatatgttgaatgcatctccccaaatgctaagttattagggaaatagtcaataaaatgcttttatccctactgataagtaggaaacactgctgaaaagtttattgaacttgaaatggagtttaaaaattccttatttaatcctgtcgacatttgagtcacttactattcatttttttcatgtatagatttagctatcaagcattatatagctatataccacagaatgatgatgagttggaactccgcgatggagatatcgttgatgtcatggaaaaatgtgacgatggatggtttgttggtaagaatctcatcatgcttttcttactagttgtgtattgagggaataacagggggcgatgagccatgcaaaaagcaaagcaatctcctctgcacagaaagaagagccttctcagatttttatgaccttggaaattctgggccaccagtctgtgttgctattatgatggtgtggatgttgctaatgttgaacctgaaaccaaatctgctgcacagaagagcagttgtcagatttattaattgggtttccatttattttttatatttatttatttatttatttatttatttatttattgagacagaatctcactctgttgcccaggctagagtgcagtggtgtgatctcggctcactgcaacttctgcctcccgggttcaagcaattctcctgtctcagcctcccgagtagctgggactacaggcgcctgccaccacgcccagctaatttttttatttttggtagaggtggggtttcaccttgttggtcaggctggtcttgaactcctgacctcaggtgatccacccaccttggcctcccaaagtgttgggattacaggcataagccaccgcacccggccctagtctccacttatatttatattgtgcatgtgtctattttgcatttggaaattttatttttaaaacccttatgaaataacacaagaaaatgttgactgagcctatgtctctaccatgaaactcaggcatacgtgtagacattctaaagaccttatttactccaggctttcaataatattagtcaaagcaccctgcttaattaaaggatttgcctttacaaggagagagatcaacatttattgagattctattacaaagcagacactgtgtttgatatgcttttattgacgttctctcaacaaacagccctgtaagataagaattatcctcatttatcagattcaaaaactgaggcccaaagaagttaattaactatgccaagatcaccagggtagcaaatagtggggccaggatttgaactcaggccacccatctctcctgaaatctgtgttctttctgctcaggcatgaatataatgttgggagatattgacccactctgcctcagtttctccctgtacaagtggctttaccttcaccttctttccaaagaccagcccttccctgatttttctggcaaagctttgctaaagcaaagtaatatcagggctggggtggtaaggacagcaagacctcaacatgaatgagaagtcagtaagatttgccttgtcctcaccagcctcttagagaactaccccatcctcccgaggtcctcagaagcccacggccctcactactttgagtcgtctgttcagtagaaatcaggtctgagaagtcagtgaccactctggtgcagtgcaatccaatagaaatgcaatgtaagccatgtgtgaaatttaaaattttctagaagccacattgaaaagaagtaaaaagaaaccagtgaaattaattctaatgtattttgtaaacccagtgcattcaaaatgctaccatttgaacatgtaatcaatattagaaatggttaatgatttattttacagacatcttttcatactgtctttgaaacccaatgtgtattttatagttacagcacagctcatttcagactagctacatttcaagtgctcagtagtcacacgtggctatcattttagagagtgcagcactagtatgcaatagctgttaaactcgttcaggaatatatatattttttatgagaacttaggtgtgggaaggagcaccagttctctaatgaaggcctgccaggcagctgggtaaaggaaatattttgggatgagtatcttccttgcatccctgaactcttcacttgcttctttttttttttgagatagagtcttggtttgtcacccaggctcgagtacagtggcacaaacttggctcactgcaagctccacctcccgggttcaagtgcttctcctgcgtcagcctcccaagtagctgggactacaggcccgcatcaccacgcctagctaatttttatatttttaatggaaatggggttttactatcttggccaggctggtctcgaactcctgacctcaagtgatctgcctgcctcagcctcccaaagtgctgagattgcaggcgtgagccaccatgcccagcctcctcggtcactttgaaaagtagcattttcaaactacaaataaagtagccttagcagaactcatttttctcatccataaggaaagatactaactagctatgtggccctaggcaaggttcttattatctctggaccctaccatctcagttctctaaccttcttggccattctccataggagttcaactagatgttttaggtttcctaagctttaacatatttttttagcttagaagtttcactttgggtagtaattccaacccattggtagtggctgcttgagatgtgtacaacaggattccgaagccaaatctaagccaattgtgataagggtgcagttatcaaattgggatgtctgctaaagaaacgataatgatgatacaacatatatttgccactcctgctttagagagagaatcccaagggaaggaactagattaaggatcagcagtgctgcatctggagcagcccaggaagggctttgttcccagatggctcaatgctcctggcttagcaggagccctaacaaggttagtaccaaagatagggactcaactgggggcttaggcacaagctggataggaatttccttttgatgggtggccatagtcagtgggcttttagaaactgcatggtttagaaaatctaaatctcaggtatcttcttgtgtcagataaatgtatgaactcctccacaaagcagaagtgttggaaagagcaatggactgggagtcagaagacctcggttcagattctgcctctgatagttactaagcagtgggacctcagacatgttacttctactctctgaacctgggttccttctgaaaaacaggagtactagaaatgcctacattgcttaccgcccagcattatttggcagcctaagtgagataagataggggaaagtactttggaaaccatacggtattctctaagctgcaggactgttacaaggggttttggagcagaaatctctgcagcgtgctgtctcaactcaagcgagtgggtcttctcatgttttgtatgtgtgtgttttttcataggtacttcaagaaggacaaagcagtttggtacttttccaggcaactatgtaaaacctttgtatctataagaagactgaaaaccatggagattatttttattggaggaggaagcatcattcatgaaccgatctttttagttgagtcagtaggaaaattaatacagtggataaagtaagaagcaaaagacagggacagagaagtgttgtgtttaaaacccaagcctgtctaaggttactgtgtattagacagggccgaactagtgtgctgagcaaaaagaattgaagcaaattgtatttacttagccgcttctgggagccacttcagcctttcccctcccctccacttcttgggtaatctgacctgaagcatagtccaggagcagagttagccagaaatgcctcctgctgccccagccttagagagctcccatctcaatcattgagcctgaaggcttcaagcccaagaatgcaacaagacccccagcctacatttctcagctcccctggagccagctgatcctgtaacgctgctggaggtcagtctgagctaccaagactgtccctagacaaaggtggagtcccccacactgcccaagaccaaatccctcactcaacctgctgaggtgtggatggggaaacagaggcaaaactgaggcacctgatgcattcagcctgctgtgcagcagtgccattgactgccctgatgttcagagagaaacgcacacaaggtttgcccatgagaattggggagcagatggccaagcagataggttatgtctgttttctgagtgatgaagtcaggaagccctgtggctctggaggccacttgtggttcattcttttcccatatccttggcttttagaaatggttaccttcaggacagtgcagctgcatttatcagagcactattgctaagttttcttttctggcttgtgtttttctgggacagtttagaattgggaggcctattctcatagaacaccaaaaatgatgttcagtgattcatttaacatacaccaatgtactctggctgctggggggacaaccataagcaagacatgcccagggtttgccgtggctccagatctactccctgtaggagttcaaggatcacacaaacggtagtaaccagggttgtgaatctgagtacaccctggcaaggcttctcttcagactgaagcagcaattctgccactaccagcagcaaccaggacgtctgttctttgtgggggccagatcagaagagagaggcccctgtgacgcccgggctgcttggtcacaactctgtccaattcaaggatgtttatcggcctctcttagatcctgagtgagacaaatacagaaatgacccattccctgcccaccagaaactcagaggtgattggggagactgacacaggaaaatgaacttaatcaagagagactgtgatatgtgctaagaagggtgtgagggagggagagatgaattttccctggagggatcctagaaagcattgtcatattgccatctccattagctcacttttaaacaactagggtgctggaagaacctttgtctgagggtagttcatagctggaaatacttggaatattttccagagtctctaaactctcatcttcccccacagatacacatccaagctcacaaataggagtagcaattctaggtggtagggttgtgtacggaacccctggctgtctgcatatatctcagaattaccccaggaccattgtcccaaagtctagagtctttacaggtaggcaaaatttgttttcaatgcctgtgcctcagctgctgtcacaaatacccatcttaggatcccatcagcttcccatcccccaccagacagccacagtaccctcactttctccctattgttctttcaaatcctgttctcaggaaagaaactgccactaattcattcacactaaggtgtaaatgattgataataggaatgagttacctcttcccacagacatttgtttttaagtatgacagagcagggccttaatcccaagggaaaaggttatggaactggagggggtgagctttctgggtagaaggagacttcctgaatttccttaaaacccagtaagagtaagacctgttgttttggaaggtctgctccaccatctaagagcactgtttttttttttttgttgttgttgttgttttacggtctctgagggaatatagtaaaaatgcatatgcacgtgcaatttgcacggcagcatttcaccgattgtggactgtattggctaatgtgtttcctggtctttagatgcaaaccattaataacactatcttatctcatagttttttcaggggtgcttcttgattagtagggaattttgaacacctctttaaatacagctagaaaataaaaccaatttgtaaagccacatttgcatatgatgccagcctcacgcatttgtatatctccagaaattcaggtatgcctcaccaatttgcccgtctttaataaaatcttgtgttaaaatttgcatcacgtcgccttcctatgtatgacgaaacaagaaacagagatttccaattgctcttttgtcttcagacatttagtaatataaagtacctatttttatgctgaaatgtttatacaggtttattaatagcaagtgcaactaactggcggcatgccttgcaacacattttgatatattagccatgcttccgggtaaaggcaagccccaaactccttatcttttgcagtctctctgggatcagtaaaagaaaaaaaaaataatgtgcttaagaagtgggactgtaaatatgtatatttaactttgtatagcccatgtacctaccttgtatagaaaaataattttaaaaatttgaatggaagggggtaaaggaagtcatgaagtttttttgcatttttatttaaatgaaggaattccaaataactcacctacagatttttagcacaaaaatagccattgtaaagtgttaaaatttacgataagtattctattggggaggaaaggtaactctgatctcagttacagtttttttttcctttttaatttcattattttgggtttttggtttttgcagtcctatttatctgcagtcgtattaagtcctattgctagaataggttactacaaaaaaggttatattctgaaagaaaaataactgacattatatataaccaattaatttaaagtattgccatttaaattacacactgagagcatgtcctatgcagacatagatttttctgttcatttatttttcttcattgcagtggattgatttgataaatagatgtgttgaattactacatttgctgtacatattatttaataaactttattcagaattgcgtggcata

SEQ ID NO: 162 - DNA, 3235 bp, Homo sapiens
gcaaacagccggggctccagcgggagaacgataatgcaaagtgctatgttcttggctgttcaacacgactgcagacccatggacaagagcgcaggcagtggccacaagagcgaggagaagcgagaaaagatgaaacggaccctgtgagtatggctttcttccctctcccgccaccccctgccccacactgcaagctgcaaacgcggtactttcgggctcgcctttgacgttaggaaactagcctgagcctatgcagggaaaaaaaatcgaaaaggtcaatttgttaagtaaggttaaatctgggtgatgctcgggtacagtttaagaaccgagggagacagttgatatgagggcggtggttgatgcgctaagaaattgcgggttggctttttgtcctcctgcattcaaaatgacatcagaatcctgcggctgaagcgcgtccccagcattcatacgttgcatgatgagttctcatcagcttacacagctactggaaggtgatgctcttgctggttctgaatatactcgtttaaaatccatttttgttttttaattatagagcagatctcacccagtccgaatgtggaacaaataattgttatgcagcgtctgcttaaaagaagtgtcgtaggtggggaaggaagagcgcaggggaatcagtcacccacctctttgtacagtctctggcgtggtccagaacctcctgctctaaagagagaagcgtgggccggctccagacagttccatgtctgtccttttcattaaagtgcaaaacgtctcggaattgtaattaaccttgcaaacaaactgatgccctttgtgagccagaaatagtgtctgccttttgaactaaattcattaacaattctttaaaataccctagtgattataggtagccctgcccttagttgtaaaactagtagatacggtcagattaatggacgaaactgctcagtacatgaggtttaaatgttaggtggataagacttatttgaagagttcttgctttgccttatgcggtttgtctctagttactgggtgactttatttggtaaaaatgcgttcagctgcagtagcatattcaagtgttgctagttagtaattatctttttaattttttgttttagtttaaaagattggaagacccgtttgagctacttcttacaaaattcctctactcctgggaagcccaaaaccggcaaaaaaagcaaacagcaagctttcatcaagtaagttgagaatcctgtgcttgcaaatatcaatagttagctgctgaactgaaaaggggaactctgatgtgcgtaagctaacatacagaacctctcttgcaggccttctcctgaggaagcacagctgtggtcagaagcatttgacgagctgctagccagcaaatgtaagttaactcttgagcttgagccattgctaacatcgcaaaagcctggaaaggctgcgtccacctaacaaaagagcagcttgcctgagggggattagactgcagtcactataggataaagcctgtttttctttcctttatttcccagggtttaacaaataaatgcatatattctctccaggtggggaagaaaatcagcctaaacaaattaaagtggcagttgcttatagttaaggttgagtcagtttttccattgcatacaatgttttcaagaggcttagttcccagagaatttatggctcccctataaatatttactttgcattgacagcaaagtacttatatttttgcagcagagtgccaacataagccttttgcctactggtatcttagtctttaaaaagctaaattttgagaattacaggtttgagcgaaatctagaaaattcatttagaaataattaaaatgtgagggataggagaaacataaggaatcatttggtctctcagttcttcacattctgcatgctctcttttctccccccttcagatggtcttgctgcattcagggcttttttaaagtcggaattctgtgaagaaaatattgaattctggctggcctgtgaagacttcaaaaaaaccaaatcaccccaaaagctgtcctcaaaagcaaggaaaatatatactgacttcatagaaaaggaagctccaaaagaggtaaggaaacaagttcctaatttcagcacaatctggacatctttagcacaaaagtgaaacaaagtaatcaaggacaaagcgggctaggaggggtaaaaagtccctccacgttgtagctttcagttatgttaaagttctcctgtgacttagctagtaaagctaatcacacataatttttattttttgttttcaaatactaaattttaatctttaactctgaataccaaataaacaacttttttgttttatttcagataaacatagattttcaaaccaaaactctgattgcccagaatatacaagaagctacaagtggctgctttacaactgcccagaaaagggtatacagcttgatggagaacaactcttatcctcgtttcttggagtcagaattctaccaggacttgtgtaaaaagccacaaatcaccacagagcctcatgctacatgaaatgtaaaagggagcccagaaatggaggacatttcattctttttcctgaggggaaggactgtgacctgccataaagactgaccttgaattcagcctgggtgttcaggaaacatcactcagaactattgattcaaagttgggtagtgaatcaggaagccagtaactgactaggagaagctggtatcagaacagcttccctcactgtgtacagaacgcaagaagggaataggtggtctgaacgtggtgtctcactctgaaaagcaggaatgtaagatgatgaaagagacaatgtaatactgttggtccaaaagcatttaaaatcaatagatctgggattatgtggccttaggtagctggttgtacatctttccctaaatcgatccatgttaccacatagtagttttagtttaggattcagtaacagtgaagtgtttactatgtgcaacggtattgaagttcttatgaccacagatcatcagtactgttgtctcatgtaatgctaaaactgaaatggtccgtgtttgcattgttaaaaatgatgtgtgaaatagaatgagtgctatggtgttgaaaactgcagtgtccgttatgagtgccaaaaatctgtcttgaaggcagctacactttgaagtggtctttgaatacttttaataaatttattttgataaataatattg

SEQ ID NO: 163 - DNA, 81986 bp, Homo sapiens
agaaaaataaaaagaatgcagcaggccaggttagcaggaacgttaagacggtgacggagaacagcaaagcctggaagcaagccgccgtggagaaggaagaactgtgctgaggtgagttgctgtgacaacccaggctgattttgagtatgtaaacaccaaaccttgttcttggctgccgctcagctcagcgggctttggagcctggctgcccagccaccacttcagggatgtgctgtttttagggagggtgtgaccctacaagatgtttctgagccttaatgcttttttgtgggagccaatgcttaatatggtggctagagttacctgaagaatctataaaaaatgaccgaagccccttctgctcaccctcccactcatcagagttggcttccgtgggtctgagtgggaaggacttccacttttaacagcatgagacacggttctgacagccccactaacatccgaatgcaggccgcagtgctcagtcctgaggataaaattctcagcttggagattggggttgatgccttacctttattagcaccagatgggtttgtaacaacccagaggtttgtaagaacttgttggccgggcgccgtggctcacgcctgtaatcccagcactttgggaggccgaggcaggcggatcacctgaggtcaggagtttgagactagcctcaacatggagaaaccctgtctctactaaaaaaaatacaaaattagctgggcgtggtagtgcatgcctgtaatcccagctactcgggaggctgaggcagaattgcttgaacctgggaggtggaggttgtggtgagccgagatcacgccattgcactccagcctggcaacaagagcgaaactccatctcaaaaaaaaaaaaagaacttgtttggcagcactgtaactgttccttctttttgattgtttgtttaaagcagggacttcagaaatttattagcaggcgaaggatgatgacctttagtacactccaaacctgaggatcttctactagaatgggacctttataatccctaatgctagggacattcaaaatgcgtgttttttttttttttttttgagacagagtctctgtcgcccaggctggagtgcagtggtgcaatctcggctcactgcaagctccgcctcccgggttcacgccattctcctgcctcagcctctccgagtagctgggactacaggcgcccgccatcacgcccagctaattttttgtatttttagtagagacagggtttcaccgtggtctcgatctcctgacctcgtgatccgcccgcctcggcctcccaaagtgctgggattacaagcgtgagtcaccgtgcccggccaatgctgtggtctttcaagcagctgctgggatacatttaatttgtacaagccctcttcaggggttgtagtcaagcacagggagtggatagaactgtattattcagtctctggacttcactcagttccaagtgctgtttgtgtcagggaccagatctatcacaacgtgcattgttagcgggaacgttttcttatttcctgtacaatagttgtgagattacttattaatcctaaagttgtgaggtttcatctgaagaaacagaaatggactgtttccattaagtctggtaaatttggctgggagtggtggctcacacctgtaatcccagtgctttgggaggctgagacgggagaatcactggaacccaggagtttgagaccagcctgggcaacatagcaagactctgtctctacaaaaaataaaaaaaatagttgggtggggtgggtggtgcgtgcctgtagtcccagctacttgagaggctgaggcaggaggatcacctgagtctggggagacagaagctacaatgagctacgatgatgccactgcactccagcctgggcaacaaagttgttttttttgagaccctgtctcaaaaataaataaataaataaataaaaataaaaaaaatataagcggggcacggtggctcatgcctgtaatcccagcacttcgggaggctgaggcgggcggatcacgaggtcaggagatcgagaccatcctggttaacatggtgaaaccctgtctctactaaaaatacaaaaaattagccgggtgtggtggcgggcacctgtagccccagctactcgggaggctgaggcaggagaatggtgtgaacctgggaggcagagcttgcagtgagccgagattgtgccactgcactccagcctgggcgacacagtgagactccgcctcaaaaagaaaattaaaataaaataaataaataaataaataaataaataaataaataaattgagcaccccaaacaacttttgttaatgtgggaactatatatcaatgtctactgtgttagaaaataagactaaaaactgggtgtggtggctcactcctgtaatcccaatgctttgggaggccgaggtgggtggatcacttgaggtcaggagtttgagaccatcctggccaacatggtgaaaccctactaaaaatacaaaaaccagccagacatggtggcaggcgcctgtgatcccagctacttgggaggctgaggcaggagaatcgcttgaacccaggaggtgggggttgtagtgagctgagatcacgccactgtgctccagactaggcaacagagcgagactccaaatcaaaaaaaaaaaaaaaaggaagaaaataaaactaaaaaaaaagtaaaagatatgattaattcagtaaaaatattaacagtaaaactactacacattatattaatataaataacatactttaaatgtaaaccactatatttcccaaaacaatcaaagaaataaagccatctaatgagaagaatgccactgttttacattttcataaatttatggcctctgtctgacttaatagaagatgactggattctcaaatctgcttctgcatttaatctgttgtaatatgttagtttggttaaaatatacaaagaaaatctggctttacacagacagagaaagtatctgcattttcagataattttggatattctttagcgctacatcaaaacttgacaagtagtagtttcttaacagttaggaacttttgttataataaaacccattggcttctcttgcactttgaatggatattttaccatgcatgactttgtaacatcacacatagatcactgcaaaatactggttccctgttgttaggcagatcttctaaatactgacatatttcattagaatacatatcaaaaaatcatattccttaaatttcaccattgatttcagcagaaaagtctgtatatattgaaaagtggtcaagctcatgggagtggatacaagttttccaaaattctaatttttacttgaaagtgtaaattttatcactggctacaaatattgtcatttgtttaccttgaagtgacaggctcacttcatacagtttcaagagactgtctgccagatgcctaagtctaaaaccatagtttgtctatcattctttcaagtaaaaatggtggtcggtgaaaaaagaagctgctaaatcaatatgcaacttgaataatcgcccaaatgcttttccttgtgacaaccaccgtactctaccagtgtgcagcagaggcggtttatgcatatttcccatttcttcaaacaagtttaaaaagatgtactcaggatcaggcatggtggcccacacctcccagcactctgggaggccaagacgggtagatcactttaggtcaggagttccagaccagcctggccaacatggcgaaaccccgtctctactaaaaatacaaaaattagctgggtgtggtggtgcataccagttaaaaaaaaaagatttattcaaggactgacatttgatacaattaacaatatttagcctgggcgacagagtgaaaccccatctctaaaaacaaaacaaaacaaaacaaaaacaaaaattagccaggtgtggtggtgcacacctgtagcctcagctactcaggaggctgaggtagcatcacctgagcccaggaagttgaggcggcagtgagctgtgatgcccccaccgcactctagcctgggtaagaccctgcctcaaaaaaaaaaaacaaaaaaaatttaccacttcatcaacgattcttaagtgaaactggctctgttttgattgtgagtgcatggcagtaaagaatgcagtgaccactggtacagtttggtgtcaccgtcctgatttgtgctaaggcgccagcagttttaccaccattttgcaacatcagtgcaagtgtcaacatagggaaaagacaaatacatcttagtagtatcatgaaaataatttttaccccaaagagattccttaaagaagtctcaggaacttttaggagtagtctatggactgcatgctgatatggaatgatttgttttaatctttcatcttctaatacccaaatccactagtctttcctttctccctggtttccttgactgccctgctgtgttttcaatctttttgaaacttctctttcactggtttcattggttttgaatacagttatctcttggtgtccatgaaggattggttctagtactcgcagcagacaccacagatgctcaagtcccttatataatatggtgtagtattgcatgtaacctatgcacatcttcacatacactttaaatcatctctggattactcataatacctaatataatgtaaatgcaatgcaaatagctgctatatagcatattgttttttatttatatttttattattgtattattatttagcttagaatccatgaatgtggaacccacaaatatggagggctgactatacacagtttcctggatttttttctactgagatataatttaccataaaattcacccttcaaagtgtaaaatgtaatgttttttagtatattcaaaaggttgtcgccgggcatggtggcttatgcctgtaatcccagcactttgggagccggaggagggcagatcacgaggtcaggagatcaagaccatcctggccaacatggtgaaaccctgtctctactaacaaaaaattagctgggcgtggtggtgcctgcctgtagtcccagctactcaggaggctgagggaggagaattgcttgaacccaggaggcagagattgcagtgagctgagattgcgccactgcactccagcctggcaacagagcgagactccatctcaaaaagaaaaaaaaaaaaggttgtgcagccatccccactatctatctaatttcagaatatcttcatcacctcaagtagaaaccccatacatgttggcagtcatttcccattctctcttaactcccagagcctggcaaccattcatctactttatgtctctatagattggcctattctaggtgtttcatataaatggcgtcaggcaatgtgtagacctttgtgtctggcttatttcacttagcatgttttcaaggttcatccatgttgtagcatgtatcagtacttcattcctgtttatggctgaataatatcccgttgtatggatactctgcattcttttttttaacatttaaaaattttttatagacaaggtctcactatgttgctcaggctggtcttgaattcctgagctcaaatgatctgtccacctcagcttcccaaagtgctaggattgcaggcatgagccactacgcccagcctggatactctgcatataatctacccattcatcagctgacaaacaactgggttgtttccactttaggaacattatgaagaatgctgctacaaacattcatgcattttgtagagacagggtctcactatgttgcctaggccggtcttgaactcctggcctcaaatgatcctcctgctttggcctcccagagtgctgcaattacaggtatgagcccatgtacaagtttttgtgtgaacatatgtttttatgttttcaattctcttgggtatatacctaggaatggatctcctggatctttttcttttttttccctttgggacagagtctctctgtgttgtccaggctgaagtgcagtggcatgatcttggctcacggcaacctccgcttcccaggttcaagtgattctcctgtctcagcctcccgagtagctgggattacaggtgtgcaccaccatgcccagctaatttttgtattttcagtagagatggggtttctccatgttggccaggctagtctcgaactcctgacctcaagtgatcgacctgccttggcgtcccaaagtgctgggattacaggcgtgagccaccgggctgttgcccacgctggagtgcagtggcatgctcacagctcactgcagcctcaactttctaggttcaagtgatcctcccacctgagcctccctagcagctgggactacaggtgtgcacaggaccggctaatttcttgtagagttggagtttcaccatgttgctcaggctggtctcgaactcctgagctcaagcaatctgcccgccttggcctcccaaagtgttgggattacaggcatcagccactgtgcttggccaatgttcactcttactttctgtgcttacttctggcatgggttggctgactacaatttgaatagacccatctttccgtttctttcaccgaaggcattttttctggctcctagatgttgctgacccccaggatccagtcttggccctccactattcttgctacactgcttctttggaaactcatctactctcaagtaacttaatataatctttatgccaaagacagatccacatctttagttctaacttctttttcagttccacatttcctacttccttgctggacagttttaatttgatatttcattaccatctcaaactctgtataactaaggcataaatttctccctaaatcagccttctctgggctttttttttttttttaaattaacagtgttaccattctccaggtcacacaacattcaaaagtgtgttttcctgccagggcatggtggctccacgtctgtaatcccagcactttgggaggccaaggcaggcggatcaccaggtcaagagttcaagaccagcctgaccaacatggtgaaaccccatctctactaaaaatacaaaaattagccgggcgtggtggtgcatgcctgtaatcccagctactcaggaggctgaggcaggagaatcgcttgaacccaggaggcggaggttgcagtgagctgagatcgtctcactgtactccagcctgggcaacagagccagaatccgtttcaaaaaaaaaaaaaaagtgttttccttcttcatattggttctctgttatctagtcatgaaatcctgttgattcctcctttccagtctctctcaccatcactgtcaccatgaccatcaccactccctttttcctctgctgatttgcagttaaaacccttatggatctcacccttaaatccttgcaatggcctcctacctgatctctgcctgcaccacgtcttcccagcagtcctataccggggtaatcttccttcagctcctgctcagaaaccatcaatagctcccagctgactactcaacagagtcagcaatcctgtctgttctaccttcaaaataaatccaaaatctgaccacttctctccgcctctactgcttcccctggtctgagttgccactatctctggattattattattaatatatcattattatattcaatgtattatcattatatacttgcctcctgactgatctcaccctgcctttgcctcccttcagtctagccttaatgaagcatctagagggttctattcaacttaagtcagcaggtcactcctctgctcaaagccctctcaaggcctctattctcactcagatcaaaaggctgattgccagcacccgcaggttctgtccctctgcccgggccccactgtcctctgactcatctctcaatctggcctctacccttctgctccagccccaaagctttcccttcctggaatgttaagcaggtccagccttggtgccttcacatggtaagttccttgcctggaaggctctttgcacagataagctcaaatccttcctacacctcaggtcctttgtaaaatgtcaccataagtatcagtgaggacttccctatcttatctagaagtgtatacaacactacccctccccaccctgtaaccctcccccatcacacacttcttgttcttctttcctgctttttctatttttcttctcagtacttattaccttttgacataccatatatcttacttttcagtctttcaaagcagggattatcatctactttagtccctaccgtaccccagtgcatagtacagttcctggtacacaaaatttctcaaaaagtattagctgaatggccgaacaatgagtgaacaagtgctctgtactctaggcagtcaatacaatatttattaagcactcactatgtggttagcattgcattaggcattgggggaatatggtagaattttaagaggtgctttctattcttaaggagcaaaatcaaacaatgatgttctatgctaagggctaactgtatggaatagccaatgttgtagaggttaaagagaaatcaatctcgaccacagtggtcgggagaagtagttcttgaacagagaagagatgacggcattccaagggaggataatgtagtaaagacacagcggtaggaaggagcatggggcattcactccaagagactgggctaatttcaagggaggaaaaatattgtaacaaaatggatgggaaagtgaaaaaccaggcagagtctgaaattgataaatgggaaaaaaaaaatcaattgactaggtgtaggagaaggaaaaggacaaattaaagatgtttatgccactgatataatggtcttcaggtcttcaaacctttttgctggcatagctcctagaagaattttgaaaaactgtatatcctcctttcacattttaaagttgccatctaaaccttatgtttttatttctttatttttttattttcttgagacagtacttcactctgttgcccaggctggagtgcagcggcacaatcacagctcactgcagtttcaacttcctgggttcaagtgatcctcctgcctgagcctcccaagtagctaggactataggtatgtgccgccatgcccccaaaacaacagcaaattatgtgtgtgtgtgtgtgtgtgtgtgtgtgtgtgtgtgtgtgtgtgtgtgtttcaagacacagtctcactctgttgcccaggctggagtgcagtggtgcaatcttggcttactgcaacctctgcctcccaggttcaagcgattctcctgcctcagcctcccaggtagatgggattacaactgtgtgtcaccatgcatggctgattttcttttctttttttttttttgagatggagtttcgctcttgttgcccaggctggagtgcaatggcgtgatctcggctcaccgtaacctctgcctcctgggttcaagtgattctcctgcctcagcctcccaagtagctgggattacaggcaggcgccaccacacggggctaattttgtatttttagtagagacaggatttcaccatgttggtcaggctggtctcgaactcctgacctcaggtgatcctcctgccttagcttcccaaagtgctgggattacaggcgagagccactgcacctggccgcatggctgatttttgtatttttagtagagtagggtttcaccatgttggccaggctggtcttaaactcctgacctcaagtgatctgcctgcctcagcctcctaaagtgctgggcataagccaccatccctagtcagtgtgtgtgttttgaggcagggtcttgctctgtcgcaaaggctggagtgcaatggcacagtcatggctcactgcagccttgatctcctgggctcaagtgatcttccgacctcagacccctgagtagctgagaccacaggaatgtactaccacattcagataattttaaaattttttgtagagatggcatcttgctatattgcccaggctggtcttgaactgctgggctcaagcaatcctcctgcctcagcctcacaaagtattggcattacaggtgtgagctactatgtttggccgtgtgtgtgctttctaatgcctattgaaggtgtgttttaagtgcttatggcagatgtctgccatgcaatctaaatggcaaaccaatcagctggatcagtcttacttacaacacacctggcctgtccctcaacttttctattctttcaccaaaatggaagttccttatgttagagaacttacagagaaaaggaagacaaaggaaaataggaaggagagttaagctctgcctgacactgtctacttaagtgatgggtaactgattaggttcagtgcttagaacttcatataatgagatacaaaatctcattactgacccactctgccagctagaagagcacttgtagatcatggacatttaggtggggatatagccacctttgatcctttctgttcactagattaagccttgttgctagtacaggcaggagccaacataccttccacactccagcaatcctgtacaccttgggctgagtcatatgctgaacagttattcatgaatacagattcttacttagaactgaagaattacctgctccaaacccttcattaggtagataagagactaaggtccaaaggggataactggcatgcccaaggttaacagagcagagctcaaattagaatccacatcacctgatttccattctactattcttgccacatgccttggcacttggcagtgacctgggagtgaatcactaataaccagctgtgtgctcttttaaagctacagctctattattctttgatgtccagataacaatctatgctccagcacctgtttatagacataagcacacccatttttatgtttgcttatcctcctattgaaaaatattttaaaagttcattttaatgctaaatttaggtgtactttctttgttaatctaattcttgagcactctgcacccttcagcagttcatttctgaaagttacctccacctaaatagctcaagcattgtgacagctgtgatacaggactcatggaaactgggacaagtgatcaaaaatgtctgagggaggaacaatagaggggacattttaaaggtaagctattggatagttgttacctgtgagaaagaaagaaaaagggttaggttaagaaatgttagttttttactctctcaacccagccaaacaacctaaacttgaactgtcccaaaggcctaccaaaattctttaatttcttcacttaagctgagtgctcttaataagcaagacttctgaggtgtagtgctagtgattaatgttatacacacccgttggctgactggtgaaacctgctgcaataactaaaaattattctataaaaatgtatagacagagagaatgttaaagctaaaagaggccgttgactcatttctttgttttagtagaacaggtgcaacagattgaggcactttaagacatctaaatggctttactagcaaagataaaaatcacacttgcctgtactcagggaattttatcacattctaattctttgtaaatcagtgaatcccctggtgcaacttctagccagattatctgggctttggaatcagaattatctagtttaaaatttagctctgcagcttgggcaaattacttacattctttttttttttttttttttttgagacagagtctcgctctgttcctcaggctggagtgcagtagtgcagtcttggctcactgaaacctctgcctctcaggttcaagcaattctcctgcctcagcctcctgggtagctgggactacaggtgcccgccaccacgcctggctaatttttttgtatttttagtggagacggggtttcaccgtgttagccaggatagtctcgatctcctgacctcgtgatctgcccgcctcagcctcccaaagtgctgggattataggtgtgagccactgcgcccggccgaaaattgagtattcttttaatggattttaagatataaaatctcaggctcagaaatttgagccacctaggggtgagaaattttggcctttgcccgcttcgaactgacttaactaaattaaatctatagaaagtaaaaaataaaggtctgtgaatgtacccagtactctcaggaagaagcatatttgccatgaagctaaaaaagcttcagtttcactccccttccaaggctctggggggtggggtgggggcgggagctagcaacgtgctcacatggtcatatatttttgtaaaacttatagaagatatttttgtattctttttcttaaagaagatatccaagattgtataagcttcagatcccagaaatcctagatttaaaaaaaataatcaaccaccaccccaacaaaattaggcacatgcctgaaaattctgctgctactgccagaattctgcgggtaggggcttcatccaaggtgttcctaataataggcagagtccccagattagttccggtgaggcttttgggaggggttatttggcgcggtgttggtgttggtaggatcctggctgtgaggctgaggcaggcctgaggagggctggggctgacaggtaggcagagttggctgggatgtgaggtgcaaggggtggtacttcggaaacaaactttgaagaggagaaggggcagcaagactgtgagtctggactttgtgatacactgtcacccctagtttagtgtgcctggttagggagaatcaagcagcatggaacccctcttcctttttcactaacatttttctgtatagtggttgaaacccagtgttaagagactgcatgacattggaaaagaaggggaggagaaaaagagtccatatgaggcaagaacagaacgcagccagaattagggcaggcagggaaaggaagggagtgagatgtgggagtcgggggggagttgaggtaacctgcattttatatgctagagctacgtattttagatgcaggggcaactgtttcggtccaggagtggaaaggactgtagaagcaatctagcacagctgtttctcacttgggaaaactgaagccctcagaggcagagggaggaatggggagcggccaggccaggacaggactcagcccccagttcctcttctcaggcgtccgattccttctgatctttctctcctgccctctctgttactgcttcctcctgttcttacccttatatacacttgaagttttatccccattttttatgcttatgggattgtacactttctggttctctctcaagtccaaccagtatgtggtaacctgtctcttcccacttcatttgtggcactggtttgcagtggacaaaaggtccgtgctcctcttctaacctaatctggactgggttgcccaaaggttgccctgccacactgccaagtgcctaattagctgttttctctccaacccctccaaacacttatcatgagtaatttctcttgtctttagagttgccaaatctaatctctgtaaatacaaatgtggtgagacttcttctcaggagtttcagcaaatgaaacaataaactcttttttaccctgctaagattctaaagataaccatgagaatactcctaattatccttataaatttgaataagtgtggttgttgggttctctcaccctttttatatcccttcaaaagaaaatacaagtttgaattctataaaatatttttctggccgggcgcagtggctaacgcctgtaatcccagcactttgggaggctgaggtgggtggatcacaaggtcaggagttcaagaccagcctggccaacatggtgaaaccccatctctactaaaaatacaaaagttagctgggcgtggtggcgggcgcctgtaatcccagctgctcaggaggctgaggcaggagaatcacttgaaactggaaggcagaggttgcagtgagctgagatggcaccactgcactccagcctgggcgaaagagtgaaactccatctcaaaaaaagaaaaaaaaaatttctaatatttatggaatgcactctcttatataccaacatacatttgtagcattttttttccttcagagtatgaagaaatcagtaaaaatgggcaaagcacaaatgacaactaatggattttgttaagtcctatgtgtcactttaagaacttgaaactggctcaaataaaaaccattttatttggttattaaaatgagacttaaaaacttaaaacaagattttaagtgatcttaaaatgtcttatcctacagaagattttagaggcaatgtagtacaaaaagctcttccttttctctgaagaatttattgagtgctttgggagtagggtgagttttttttttttttttaacatatgtttgattcaattaagcaaaaatattgtttcatgtctcactgaactgaatacattctactatccattggttttcaatgttcacttatttattttattttagtagagactgggtctcactgtgttgtccaggttgggttttcaaattttatgtctaacacagtgtgctaaatacaactgagtttcataagccatttttcccacttctgtacatggcactggtctcaacctgtatcatgcataagaattacctaggatgcggccgggcgcggtggctcacgcctgtaatcccagcactttgggaggccgaggcgggtggatcatgaggtcaggagatcgagaccatcctggctaacaaggtgaaaccccgtctctattaaaaatacaaaaaattagccgggcgcggtggcgggcgcctgtagtcccagctacttgggaggctgaggcaggagaatggcgtgaacccgggaagcggagcttgcagtgagccgagattgcaccactgcagtccgcagtccggcctgggcgacagagcgagactccgtctcaaaaaaaaaaaaaaaaaaaaaagaattacctaggatgcttattaaaaatgcagattcccaattcctgaagggaggtcatgccttggcatcttacttagcgaatcagtgctatacagaaagtatgagagactggttcatatcaaagaatattgtgaaactctacactatatttgtgaagatatagaaaacccgttttatggctaaaaatcatcattttactactactaagcttcattattagtagatggagtttttttaaagggtcatttttcacaaagaaaaatttgttttgtcttttaacactttaggactgttacttcatagtttatccggggcagagaacaacagcgggttactctcaaacctgctctggagtttcagactagcagctgacatttttggggacctttctttaagcttgacattgtaaacactttgtatgtattaacccacttaatcctcaaaacaaccttgatgagtaggtatccttatcttacggaagaggaagctgaagcacagacagggttagtgacttacctaaggtcacagtgctggaaggtagcccagctggaatttgaacccagacagcatgtgggttcagagtgttttcatttttaactactctgctatattaccctctctagttttcagtattcatattagcacctcagccttccccagatgactacaaatcccatacatatgtgtatacacacatacccagggtcattcatgaaatctgaaacttcgggtgttcaatttgactttatagaaccttctacctctcctggctgatagtatctctttctcatttcacaaattaaacttcctataacactaccttaaacatgccacccctgctcaaaatactctggtggcttcctacgatctataagatgaaagctaacttccttagcttgccattcaaggcccttcacagtctttccagtcttactgtttattctatccctacttgagcacaaagcatttttttctttgatcatgcatagtccttctttcttcatttttttaagtgtacaattcagtggattttagtatattcagtgttatgcaaccatctccactatctaatgccagaacattttcatctctgctatctaatgccagaacattagaaaccctgtaccgcatagtggccattcccaattcacccttcctcttatcccctagcaaccaccaatctattttctgtctttacgaattagcttattctgggtatttcatataaatggaatcatacaatatgtggccatttgtgtctggcttgtttcatgtcacaatttttcaaggttcatctgtgtcgcagcatgtgatcaggatttcattgttttcttatggctgaataacattccattgtgtggatataacattttgtgtattcattcaatttgtcccaattggtggacaactgggttgtttccacttttggctattataataaagctatgaacatttgtgtacaagtttttgtgtgaatctatgctttcagttcccttgggtgtaaccctaggaatggaattgctgggtcatatggtaactgtgaactttttgaggaactgacaaactattttccacaagtggctgcaccattttacattcccaccagcaatgcttgagggttccaatttctccgtatcttcaccaacatctgtttgtgtgtttttgattattgccatcctagtaggtgtgaaatgatatatcattgtggttttgatttgcatttccctaatgactaaagatattaaacagcttttcacgagcttattggccatgtatatgtctcttttagagaactgtctattcatatccattttgtaaactgggttatctttttattgttgaattctaagagttctttagacatctgaatactagacttatgatttacaaatattttctcctattctgtgggatagctttttactttcttgatagtatcctttggtgcacaaaagcttttaattttgatgaagtccaatttatcactgatcataccagctggaaatctacttttttctatgtcagcatctcaatattacttgatgatctggggagaatttttgaaaatataaaaataatatacataaaattttgatataaaacaagagggccaagacttgaagaaatctggagcttctgttgagacgatgacctggggtcccaatgattactgttaggatcttaatgtacttagtggaaaggttgagaggcgctggcctacggcaggcactcctacagtaagactgaacctaaactgacattggtcagtttacttgggaagttgaccatatgttttttgtttgttttctcccaggctatagtacagtggcgtgatcttggctccctgcaacctctgtcttccaggttcaagcagttctactgcctcagcctcctgagtagctgggattacaggtgtgtgctaccacacccagttagtttttgtatttttagtagagatggggtttcaccatgttgcccagggtggtctccaactcctgacctcaaatgatccgcccaccttggcctcccaaagtgctgggattacaggcgtgagccatggtgcctggccgatggtatacattttaaaaataaatgtatgctatctaggagttcccatgttttgctattatttcctattctttcagagcaccaatagtcaatgaagaattaaaagtgaagtcagattatcctttagctaaagaatggggatttctagtagtacggttcaatatttttggtcagggccccatatgtttatactccaactttaatcaatcttttccacttctgactgagggatatgctgtaggaactttatgtgtactatttcagttggcctctgctggcttataaacagtagttgatatttagggacagtaatccagagtagtgtccaagtccatctgagtttagaattgctaccacagcagaaattggaaacctcgagagttataagccatttaccacatctacatggatgccacttctccttaaagcatatacaaatatatagagatcggaactttaaccttctgggatctaatatcttcctaagatttgcatacagaatgtacacatggatcttctattatagcaaattcttttttttttgagacggagtttttgctcttgttgcccaggtggagtgcaatggcgcgatctcggctcactgcaacctctgcctcccgggttcaagtgattctcctgcctcagcctcccaagttgctgggattacaagcgcctgccaccatgcccggctaattttttggatttttttttttagtagagacagggtttcgccatgttggccaggctggtctcaaactcctgacctcaggtgatccacccaccttggctttccaaagtgctgggattacaggtgtaagccaccgcgcctggccagcaaattcttaattgcctgtaaaattactatctcactatgtattattttcggaagcagatatgaccgtgtacagttttcttataaaagtgccatagcaacatgaatactcagtactgacaagcatctttaattgacaaaagctttttttttttttttttttgagacggagtctcactctgtcccccaggctggagtgcaatggtacgatctcggctcactgcaacctccccctcccaggttcaagcgattctcctgcctcagcctcccgagtagctgggattacaggcgtgcaccaccgtgcccggctaatttttgtatttttagtagagacagggtttcaccatgttggtcagaccagtctcaaattcctgacctcaggtgatccacccacctcagcctcccaaagtgctgggattacaggcatgagccactgtgcccggccatgacaaaagctttttatttttaatttaatcttagcctatggttaaagtgaagcatttaaatagcctacttgatgacttcatgtgagccaagaacaaaacctgggtctgataatcttctacctactctctgacaaactgtccctacaattataatgcaatgacatttctatgagcagcctctattactaacagttattatacacttggttcttatacagaatacttcattcaagatgtccagagcttcatctagctcactatcttcaaagcttctgcttgcaaagggaggaacttacaccatcagtccattttaagccaaaaggaaattcttacccagaaattaattacttatcctttttttagtgtgttactctccacacccccttcctgttttgaaagcagggagaaataatgatgtatacagtatcttctgaactatacaaattacagataagctttaaaggtctctaggaagctactactgtttcaccataagaactccaagtgggccctaaatctcctggtccttgacttcagccactgctaggaaaatgtcaatacacacacactcctatcttaaaaactctgtgcttgagaagaaggatggtttgctttgatattagactagctttccctggcagctgcaactagggaacctaatttttgttaaagctacaagtcacaatttattacttatattaagaaacgtaaggagatcaatcaggagaatgctatattgcttaaggtggttgatgcaacacaaaaaagatggagccattagtccaataaccttattaaaaaaattcctcctctgggtgtggtggctcacgcctgtaatcccagctactccggaggctgaggcaggagaattgctggaacctcggaggtggaggttgcagtgagctgagattgtacctctgcactccagcctgggcaacaaagtgagactccatctcaaaaaaaaaacaaaaaacacaactcctctgtatctaaccttcttatcaaaagtgtgaaacagatggtgtatgtgatgatcatgataatgaacataataacaatgtgaacataataacaatgtgaacataataacaacaacatctctttattcctcagataacatccagagcaggaactctggagtcaggcagaactgaatgtgactttaagcaagttactcaatttttgtaggcccaactttcctatctgtcaggcctacaaatgggaaaaactaaaccataaggaatctaagagttttgtttattccaaagagtacaggatacaatgacctttctttttttttctgtcacccaggctggagtgccatggtgcaatctcggctcactacaacctctgcctcctgggttccagcgattatcctgtctcagcttcccaagtagctgggactacaggcatgtgccaccatgcccagctaatttttatctttttaatagaaatgggtttcaccatgttggccaggctagtctccaactcctgacctcaggtgatctgcctgcctcggcctcccaaagtgctgggattacaggcgtgagccaccgcgcctggccaatgacattccaaaaaggtactatcaggacatcaagtactacaaaataggcaccggaagaaatatgctaaattagtaatcctcaaactctagagtaataagtataacctggcttgctagaacagattactgggcactatcctcagagtttctcaatcagtagttttggagtagaccaaagaatctgcatttctaacaggctcccataagatacagatgctgttggtcacaagaccatactttgtgtctccttggaaagggagaaaataaatatttattgacagggaagggaagaacaattatttaagatgatcttgggtcaagcatggttaagtgtttacatagtttatcttatttagtccttacaacatcccaatgagcaacagttctcaaacttttccaggccaaaggagaatgaacacatcacaaaagagtatgcctaagcagtcttctagaaatagaaaatttctttgatgactgtattactttaaaaattcatataaattttgtattctgtttcaaaatactgctgctagttatgaatgaaatataaatctaaaaatatttatcagataaattgcttaactcttcattgcaattctttagtaaaattggcctgtgggaatataaagaaatgggtggttgaactctggtaatgagcttatggtgaaacagctagtacatatttatttgatccagcatttgaacctaggccagaagatctctaaagacaatgcacatgttactaccttactctgtcattgacctccacctacataaaaggcctatcatgtttttctctactgctcttttacgatcttctattgttctggttaaagaggactacttgctgttcctcagatttttctcaaaatttttttttctttttccttagattcagggacagacagggtcttactcttcctgatctccagattactctttgtagctggaaagctcctccgctttcatctctactttactagaatcttaccatcccctttaaggcccagctaaaatgtcactttctttcagaagaccaaataccattattgattgattgattgactgactgagacaaggcctcactcctgttgcccaggctggtgcagtgatgtgatcatggctcactgcagccttgacttctggggctctggtgcatcctctcacttcagtcccctgagtagctgggactacagacacatgctaccatgcccagctaatgcaaatatcatttttaaaaggcgactgaactggacgcctcatatgagctcccatggctgcccagacatgctttcatgtcagtgattatataattttttttgtaaattagcttatgcaaataatcttgtggaccctaacttatacatgcttctgcaaagaaacatgtttaacgataaagttatactggaattcaaaacatgatgttttatggaatgtaagacattggggtatagataaaaagtggttggaaaaaatatatatatttatttttagagatgaggtctccttctgtcatctaggttggaatgcagtggcatcatcatagttcactgcagtctcaaattcctgggctcaaatgatcctcccaccttggtctcctgaatagctgggactacaggtgcatgccatcatgcctggctaattaaaaacaaaatttatttatttatttttgagacagaatcttgctcttttgcccatgctggagtgtagaggtatgatcttggctcaatgcagcctcaacgtcctgagttgagcggaggaccccgggctccagtgatccttccacctcagcctcccaagcagcagggactacagacatatgccacccagcccagttaattttgttcactttttgtagagatgaggtatcactatgttgcccaggctggtcttgaactcccggactcaagtgatcctcttgctttggcctcccaaagtgctggggttacaggcgtaagcaccgtgcctgacctggaaaattgtatttaaaagaaattcttggccaggggcaatggcttatgcctgtaatctcagcactttgggaggctgaggctggtggattgcttgagctcaggagtttgagaccaccctgggcaacacggtaaaaccctgtttctacaaaaaatacagaaaaaattagccaggcatggtggctcacgcctgtagttccagctactcaggaggctgaggctagagaattgcttgatctgggaagcagacgttgcagtgagctgagattgcaccactgcactccagcctgaatgacagagtaacaccatgtctcaaaaaaaaaaaaaaaaaaaaagaaagaaagaaaaagaaattcccaaacgggaaggtttagattatgatgaaatttgtggctatgaactagaataaagtctaaacatgtagaagtaatatacctagacttttaaaattggaagggtccttgaaagtcatttaggacagtctccctattttatagcagtagaatttttggaccctgctttgtattatggtcagaagtctctttgtttcattaatgctgcttaattttcatctagcttacctttggtctctttatattgtgattccagtgctacctgaagaaagctttctgcactgaataatggatttttttctgaagggccagacctgactttggtccaaagggaactaaactgcaggacctcctttgattttaaaggtcgctaactttagtgatgctaattctgaacctctgagggatgaattgttacccccagctgcaatttttgatcagtctaacagccaagccaccatcatggccaagactagggaacactcacagtaagcagggtggccatctgctccatttggccagctctagctttggacactgagaggtggctcatatactgattgcatcttggtttaaccactgagagtgaaaagagaaaaggacaccaagggcatttatcttttccagccccacatgctcctcccaatctcagcggtaaagagcaggaactctggagtcaggcagaactcagtgtgacttactcaatctttgtagggctgactttcctatctgtaccaggagatcttaacagcactataattacctcacgggtaactggcaggtttaggtggggaactgcctgttgaccatttaggacaatgtctggtacacagaaaatccttaataaatgccagctattactattatcaaggggtagcaacattaacatacccaatcaacgtgaataagatcctcttctctgtataaccttttccatggcatttcattccctccctgagtcagttatgataccaatactgtctcctaaaactctgtctttagcccagcttctttcctgagctcaagaccaggcttcacaactcccaagatacctggaagtgcccttggaacctaaagtgaaccccaaaccagatcatttcctggcacttaagagtatctgatcctccacttgatctctggcattggtcaaagatacccttatctttccagctactcaggcaggaggatggagtctttttaaaattacgactttatcctccagctaataagttgccaagtcattcattcatacattcacctattcaagtatttatcgagccttttctacaagccaagtaatgtgttaaactctgggtacactgtggtaaacaaaacttccatggtttctgtcctcatctacaaatatataattacaaagtgtaatatatacttggaaggaaattccggtcagtatgagaaagtgtaacaggggacataattgaacatgagagtcaggaaagaactcagaggaagatgaaaaggagtttgtcaggtgactgaagggcactccaggcagcaggtaagcgtgtgcaaaggctctgaggtagggaagccttcatgcctttcctgaggaactgaacaaaggccatgtggctaaaaggttgtcagcttgcttgggacgaggctggggcagcaggcaggggcttaccagccaggtatggaagcccctgaagggttctgagcaggagaggcacaggatcggatcactctggctgcttttggagagtggactgagggggcaagaacagaattagagactagtcaggaggctacttgggtggtgctggtgacagatggttagtggctgtggtgatggagaatagtagatggatctgagacacaatccagaggttgtattgataggattgggtgactgggatgtggggagtgagtgaagaaaggcaacaaagctgattcttgggtttcaggcatgagcagctgtgtagatgactgtgtctacagaatctacctttcaaaaggttccggtattcctagaccatctcacaggagatgcccactttctcctctcagcacagccaccctgcctccaagtcattataacttcctctctagatcacttctttctccttagtttccctactacttgtctatgctgacttcaaatcaccccaggctgtattatctttttaaatacagctccagccatattattccccactcaaaaatctccaatgttccctatcacctacgtgagtactaactctttaccttggctttaaaggctctttaacctacagttccagcctgattttccatcacttctttaaagtcctgttttagtcacactagactactgactgttccttggctgtgttgccacattcacacctcagtgcctctgctcatgctattccttaagtcttaccatctcagcatgctgaaaccttactcatctttaaatgaaatgtcccatctttaaatctcacaaagctctgtacctctcttatggtgcttaaaatttattggggttattagtatacttatctcaggcccatttcctataccctaacagaccataatacctttgagtgcagggctcctgactcatactacacccactgctcctgcccttgcagggttaagaatactgctttacctgtagtaggtgcatgttactgaatttatatgagcaattcatggtattagttacattaaggagtgatgagatccaagctgttgaaggggagatgttttctggtagtatttgccagcaccagggctcatggcaaaattcctcttcagcatccttccatcaaactccttgcaagcatacaccacacaaacataaacacactccttttacagtcttctgactgctcaaaatactccagtgcagcagtccacataagcttactttttctttgaagtattgaatattaaaaattgcagcctcggctgggcgcggtggctcatgcctgtaatttcacgcctgtaattccagcactttgggaggccgaggcaggtggatcacgacgtcagtagattgagaccatcctagccaacatggtgaaaccccgtctctactaaaaacacaaaaattagccgggtatgatggcgtgcaccatagtcctagctactcaggaggctgaggaggagaactgcttgaacctgggaggcggaggttgcaatgagccgacatcgagccactgcactccagtgtgggtgacagagcgagactccgtctcaaaaaaaaaaaaaaaaaaaaaattgcagcctctaactcaagatttttcaaactgttgtaactcattaacaagtcatgaaatcaacttagtgagttattattaagggcaagtattctttcctgaaacttgtttcaaatacgtgtatacacatacaagtctgtgtgttctgggtcacaatgtaaaacatatttcttacgatggatcttagtcaaaaaggtttaaaagccagtgctttaatgctctgcattccaccccaagatcagcacacagaactgaagtaaaaaaagtaagatgttaagaaaatagtaattagactatctgattaaaacgtacacttgaaaatgtgaatgatatacctaactcttcccttggggtatttgcatttagggaggtgtttttaacctgaattaatctaatcagtggaaagtgaaccagaaatcattttggactacaggctttcttggtacctccagcaaggatttcctccagtatcccagttccctgagagagctgggttcaagaaccaggaactccactgctgaaaggctactggtttctaggttacaatacacagaaatggtaataacctttgtaagggaaacatatttacaaccaaaatgcactcctaccacgcacacatcaagcttaatcaatttatatttatatgtatgtatttaaactgtgcctactaggaatacaatcctacccgtccacatgatgagctatacctgataggaggcaagttgaagccccaagttgatctaaaaatgagaaatactatgaattactgaaggcaacagggtatgtgagataggaaggcagggtgtgggaaatggtagaatgagcaagggggctcgggagtgtggtagatgcattacaccaagtgtttattactttgatgattggtggtaatgagagaagatgagagaagaggagtgggatatggagaaaacaatttcctagtcatctgtatgccccgtgacagtacacagcaatagcccagcaggagtgcacaggcaatatgtgattatgtcaacaaacaaaagttgaattctttatgtcaacaaacaaaagttgaattccaagtcctaattccagccctaactccatttaacagattgccccttataactggttgctacttgtgttacattctgaatttattgttgagaaaccaacagtttcctaactaatgaatgtaatacaatttttttttttttttgagacagggtcttgctctatccttcaggctggagtgcagtggtgccacggctcactgtagcctcaaacttccaggcccaagtgatcctcccacctcaatctcgggagtagctgggaccacaggcatggcatgagccaccacgcccagctcatttttttattaattttttttttttttttggagacagagtcttgctctgtcacccaggctggagtgcagtagagctaacttggctcactacaaccttcacctccagggttcaagtgattctcctgcctcagcctcccaagtagctgggattacaggtgcccaccaccatgcccagctaatttttatacttttaggagagatggggtttcaccatgttggccaggctggtctcaaactcctgacctcaagcgatctgcccaccttggcctcccaaaatgccaggattacaggcatgtgcccctgcgcctggcctaattttttgtagagacaaataaaatgttgcccaggctggcctcaagcgttcctcccaccttggcctcccaaagtgttacgattataagcataagccgctgcgtcctgtcaaatgtaaacactaattgctaattacaatgtcaaaaataactgggtcagaaacaaggatgaaagagtaggaagttcaaagctggtgtagtgcaaataagcctagactagggtgctgataaatttggatgatgtctgggtgacactgagcaaactgcacaaccccagttccattccatctttaaaatcttacgattccacagaggaagaaaaaggtgatctttatttggaagaaaggaagatcttggtttgatatgtaataggaaagtaacaatgctattaggcaaggttgtttaaatatgaattaatgcctatcccattatctagattgggttaacaccctctggtgatattatatatcagtgtttctactgaatactggataaacgccaaacttctctctggcatttaaggctttccacacctgcccaactttatctcaaacttctcatggttcagacctctaaccctctgctctagccccagtcctgtttccttatcaccacttacagcttttgcttaatccttcccactcacccgctcctaaagttctataaccttcataaaacgttccaactgcttaaattttatgtatatatatgtacaggtacttcccaatcttggcccttctacaggactttatggcaatcctatgtggtaggcactgttgtcctcatttcatagataaggaaattaggcccagagggttttgcggcctgcgtagggtccttcagtttgtgagcagcaacaaggctggatctgatttgtttgccttcaaaacccatacttttttccattgtactatgctacctccatgtattaaaccatggagtgaggatgcggtaaaaaagcctataaaccagttgtaatacagcttgttgtggcataaattcagatacaccacatcctttgaaccacacgtgtaataaacgcttggaatagtatggatcgattttaaggaggttgttagtcctgtttcccaagtccagcattaaaatgatattccagggtaaatgacaggtaggtggcttggaaaataaaaaaagcaacatggtataaaaagaaaatagtaggactgggacagaaaagagacgaaagtataatataagctggcaataagcaaaacaggcgctcagaatatgaaatatggaatatggggctgaaaaggccgaaagggctaaagttaggggccctatgcctaccgatgagatgcgcgcgtgtgcggggtggttattaatgacagagcaggacacatggccagacagtggaactcaacagagcgacaaataaagacaggtcgtgggagcaagggtagagcctggcacaagagggcgggggcccgactgagaggccagagggcatggcaggggttgaagagaaagatgaagaggttcagagggcacagcgccccagactcgagacaggacttctgtcttccctcagtagctgttggtgtgcttcaggattcacacccgcacccggcacagccctcccgggtggctccgggaagagagggaggtcctgtccccattcctcccctactccccggggactccgcgaggggcggagggaggcaggagggtccttacccaggaagatggagatgatcagccgcagcgcctgttctgacgcgcccagggacgtcgccaacttgttaaggctcagctcctggaaacccgactgcagaacccccgccagcgccaccacagtcccctcgtccccctccgctgaggacgccatcttaactccgggagccccacagggaccccccagctccgcgcgccccgaatgcgggcaaaacgctatcgcttcacccccaattccggctcggggcccgcccacggcgtgcgcattggctggaggcccgccccgcggcgccagctcaccccgttattggccgacctgcgcagagggcggggcctagcgcggcaaggtaggaagagggcgggtctgaaggtttgtaaggcaaaggtgactcctgccgagaatgcacacggggaggctcagggctgggcggggcttggcgtcgggacccagagctgccattggaaaggtctgagcccgtggcccggcgacagttcaactccgttcgaaatgctcccaggaggagccctccggggcgaccgtccggccggccggttcgctgccttcccattggctgaggcgggagcaggcgagagtctggacgcgggggggccgcccgcgcgcgaggttactcccggtcgccggcgctggggttactggggcatgtaacggggaggcgggaacgcccgcgccgcctttcgcgcgccccctaacggcgcctcccggcccgttcttaaattcttaggttgttagactcgtcgccttcactcccggaggttcagcggaaagcccagtgccccaggaacagacattgtctgctccttttatttcatggatcccttttccatgcagtttcctgtagtaaaacatgaccttccccctagaggcgatgaaattaagatatgcctatttaacacttattattttaattaaaaattcaaataattttgcactgagtaatacatgtttatgataaaagttataacagtatagaaatgtaaaacagaagagtcctgtttcccctccctgcttttcattctcacttcctacaggtaatcctgttaagattacgccaaaaaaaaaaaaaaaaaaatctgtcgagcacttaccatatgccagggactgtgctgggcttgggaatagaatcaggagcccagagccacggagtgggaggatgcacaaataatagcatcaattaacgtgttattgcaagagaaggtaagtgctctgaaggaaagggtcaaggttctgtgagagtatgtaacaaaggaatgctaagagtttcttgcaataactcttagttacaataatttgtggcgcattcttgtaaaattacagcttatacttctgtagcacttgcactttataaagcactttcatccgtattatttcacttgctttggctgcgcaatagaatatttattatgatgatgtcctcttacagacacagaggcttggagaaattaagaaactgggtaagttcctttacaagtaagcggcagacagaatttaaacctaggtctgtcaaattccctacccctactcccattttgggcaagattttaaaaaacaaaatatttcattcacacggaaaagtagaggataatataacttctccaggttaagaaacaaacatcacctatacatttgaaaagccggtatatcccttcctgagggcatttccctccttcctttctcagaggtcaccactttgctgactttggtatttatcaatcccatgcctattttaatactttacatacagcatatatccagaaaggaaaattagtatagttttgcatgccttatattggccgggcacagtggttcatgcctgtaatcctagtacttagggaggttgaggtgggaagattgcttgagcccaggagttggagaccagcctgggcaacatagaccctgtctctacaaaaaaaataaaataaaatttagatgagcatggtggaacatgcctgtagtcccagctactcaggaagctaaggtgggaggatcacttgagcctgggaggttgaggctgtagtgagtcgtgatcatgacactgcgctccaacctgaaagacagagcgagactctgtcttgcaaaaaaaaacaaaaattatatatataggcctgtaatcccagcaatttgggaggctgagacgggtggatcacctgaggtcatgagttagagaccagcctggccaacatggtggaaccctgtctctactaaaaatacaaaaaaattagccaggcgtgatggccggctcctgtaatcccagctacttgggaggctgaggcacgagaatcacttgaacccgggagatggagtttcatgtgcgtccgtgtgaagagaccaccagacaggctctgtgtgagcaacaaggctgtttatttccctgggtgcaggcgggctgagtccgaaaagagagtcagcaaagggtggtggattatcattagttcttataggttttgggataggcggtgaagttaagagcaatgttttgtgggcaggggtggatctcacaaagtacattctcaagggtggggagaattacaaagaaccttcttaagggtggggggattacaaagtaccttcttaagggtgggggagattacaaagtacattgatcagttagggtagggcaggaacaaatcacaatggtggaatgtcatcagttaaggctatttttacttcttttgtggatcttcagttacttcaggccatctggttgtatatgtgcaagtcacaggggatgcgatggcttggcttgggctcagaggcctgacatggaggttgcggcgagccgagaccatgccattgcactccagcctgggcaacaagaacaaaactccgtctcagaaaaaaaaaaaaaaaaagctgggcatggtggcttacccctgtaatcccagtattttgagaggctgaggcgggcggatcacctgaggtcaggagttcgaaaccagcctggccaacgtggtgaaaccctgactctactaaaaatacaaaaattagccgagcatggtggtgggtgcctgtaatcccagctacttggaaggctgaggcaggagaattgcctaaacccaggaggcagaggttgcagtgagctgagatcgcgccattgtactctagcctgtgtgacagagcaagactccgtctcgaaaaaaaaaaaagaaaattatatatatatatttataacttcagtgaagcctaagcatatagtgtttatacagtccaattaaactgcctttacaaaattatgacagtaagagaaatctgatatagttgacttcatcttgctttttttgagagtctttctctgtcacccaagctggagtgcaagcacgtggtcttagctcactgcaacctctgcctcccaggttcaagcaattcttgtgcctcagcctcccaagaagctgggattacaggcatgcaccaccatgcccagctaatttttgtatttttagtagagatggggtttagccatgttggtcaggctggtcttgaactcctgacctcaagtgatctgcccgcctcagcctccccaagtgctgggattaacaggtgtgagccactgtgcccagcctccctcatgcttttaacctccaagctatctttggtcattcctgggcataaaccaaactgactttgagagaaatttagtttatagttaaacttaaagcagggataatagccctttcccaaactaagccacctttataaaactaatgaaaggctgcaaggttaggcttatgaaagggccctgaattccgctaaaatgtaggcataattaagtgattaccaaccgttgttcaggaggtcaccagatttgtaacttccccaattacgcctctagataacatcatattgtagaacttaagattgaccttttaggatgtcttttcagattttggcatttctgcaaaccccagctggactcgtgactcagccagtcctatggaccccacccagaggtggagtcagggcatgaggatcatttgccatacctctatgattgcatccccaacaaagcagcagcacttataccgtaggcccctgcccaccaaactgtctttgaaaaatcctagcctccaaattttcagggagattgatttgagtaatagcttcatgtaccatgtggcatggtcagccttgcatcaattaagatctttctctaatgcaatgccatggtctcagtgaattgattttgtctgtgcagcgggcaggaagaagcccacagggcaattacatatggtagtgtatggcagtgtcctaggccttcacattcactctcacactcttcacactcactgactaacccagaacaactgcgagtcctgcaagctccattcaggtaaatggcctatacggctgtaccatttttaaatttttaaatttttttaaatttttattgagatggagttttgctcttgttgcccaggctggagtgcaatggcacgatctcagctcactgcaacctccacctcccgggttcaagtgattctcctgcctcagcctcccaagtagctgggattacaggcctgtgccaccacgcctggctaattttgtatttttagtagagacggtttctccatgttgttcaggcttgtcttgaactcccgacctcaggtgatccacctgccttggtctcccaaagtgctgggattataggcatgagccaccgtgcccagcctttttaatcttttataccatatttgtactgtaccttttctatgtttagatgtgtttagatacacacaaatagttattacaattgtattattattgctcacaatattcattataataacatgctgtgcaagtttttagccaaggagtactaggctatacccttgtaaactaaaagtaaaattcgaagcccccactaactgacctaatggaccctctcctggcaaagcagaccccagagtaaccttgaaaactgagttcttggtcatgatgggatgaggtcaggcacgcctccttatgctcacccctccctccctaaccggtttaggctttctaacctaagggctaaacagaaactagccctttcaaaagactctaccagtgatatcaaccaactgtctgatattgctcctccttttatgcctgataagagactcttgaatatgaagtggttctgaccagtctacagagaatgcagtgagggttttcatgttctctgcttcaccttttgatgccagagggccaaaaactctaccttagatcatcttaatgccaccattttttgaacatggggcccgtggagaagcatgaagctcaattgcacatgagtatgtttctcctttcataaaactcatcactcctataatgtactaaatacgtacatttggccaccccactcagcataaatttctcttccctttggccctcccttgaagtatctgtttctggtttgtggctggaggctgtgcttcccctcccgtcagaatggccaccctgcaggctgcaaccctttatgagaaataaagctctcttttttagatttatgaacctcatcacctgatgaagctggggacattgagcccctaaattctgattgatcttctttgctagtgaaagaggcctccccatccccagtggaggcatcccacctgagaggactaaccctgcattgcctacgaaactgtaatggcctccctgaggaagttgccatgcaggacaaagcagatgctcctcaggacccttccccacctgccctctttgcttctagacctgtaactagactgaaatcccagcaggcccctaaggtgagggacaaagtgtgacccatgaggaagtgtgcaacactccaaaagaacggcttaagatgtctaatttatacagacagaaattttgggaacacgtatgggaatggatattgaaggcatgggataatggtggaaggaacataaaactagatctggccaaatttatatgggcttactaaatagaggttctacatttaatgttgcagctcagagagttaggaagagctctaacaatttgtctagctatttggctgagacatggaccaaaggtgggtcataatgagtaaatcagaaattccaaacctgccttggtttaatgtagaggaagatactcaaaggcttaggaagattgaaaatttagaggaattgtcatttaagaactattcacccacactggaaggatccggaagacatatctttcaccattattgtaagagataaatttgtagctgggcatggagggtgatgcttgttatcccagcactttgtgaagtccagttggagaatagcttgaggccatgagttcaagagtagcctggggagcatagtgagaccctctctctacaaaaattaaaagaacaaaacagggctgggtgtagtggctcatgcctgtaattggcactttggggggccgagttgggtggatcacctgaggtcaggagttcaagaccagcctggccaacatggtgaaaccccttctctacaaaaatacaaaaaaacaaaaacaaaaacaaaactagccgggcatgatggcagtcacctgtagtcccagctacttgggaggctgaggcaggagaattgtttgaatccgggaggcggtggttgcagtgagccgagatcgcaccattgcactccagcctgggcgacagagtgagactccgtctcaaaaaacaaaaaaacaaaacagctgggcatggctgtgtgaaccccacatatctgagatggtctcagttaatttagaaaatttattttgctaaggttgaggatgcgcacccgtgacacagcctcaggaagtcctgacgacatgtgcccaacgtggtcagggcacagcttggttttatacatcttagggagacatgagaaccaatatatataagaagtacattggttctgtccagaaacgtggggatagctcaaagcagggagagggcttccaggtcacagataggtaagagacaaatggttgcattcttttgagtttatggtaagccttaccaaaagaggcaatcagatacgcatctatctccatgagcagaggaatgactttgaatagaatgggaggcaggtttgccctgagcagttcccaacttgacttttctcattagcttagtaattttggggccctaagattttcctttcacatttacccccttttcttttctttctttctttttttgagagagtctcactctgtcacccaggctggagtgcagtggtgcaatctcagctcactgcatcctccgcgtcctggattcaagcaattctcctgcctcagcctcccaagtagctgggattacaggcacctgccaccatgcctggctaatttttgcattttcagtagagatgggatttcaccatgttggccaggctggtcttcaactgacctcaggtgatccacctgcctcagcctcctgaagtgctgggattatgggcatgagccaccatgcctggccaggatcagcaatgttttatgtatgtatttatttatttatttatttattttttgagatggagtcttgctctgtcgcccaggctggagtgcaatggcgcgatctccgctcactgcaagctctgcctcccgggttcacgccattctcctgccgcagcctcctgagtagctgggactataggcgcctgccaccacgcctggctaattttttgtatttttagtagagatggggtttcaccgcgttagccaggatggtctcgatctcctgacctcgtgatccaccctcctcagcctcccagagtgctgggattataggtgtgagccaccggcccggcctcagcaatattttaaacaaaaagtcaaaaagattagttcagtccatgcagttaattcctgttctgcttgatattcatgaacattttagctccccattagtcccaaaagttattcctctattccaatgtcacaatctccaaagttataaaaaaacctgcattcaagagcacctgtagagttttatagctgattataaaaccaccttctaaagaggaccaaaacattacaattgtccctagaagacaaaaagttttagggcagccatagtcaaagacacattgacaaggaaatttgttacttctgtggtacacaataattttaacataatgattttgattattactgataatgtacaccaagtcatatcagaattacaggagtttcccataattttggaacacataccaatatcatatttatacaaatacagtccaaagaaaaccaaacaccattttatatttgacaatgcttcttgtatcatttttgtaacaaataaaccaaattatgtcatttttagaatttagggaaactaatatcttaaaggaataattaggtcagaaaaagacataatttatcatttgattttggaaagtttgtcaaatatcaaagctttacaacacttgatatcaaaataggatcacaggtcattgtaaaataagtcatacatttaaccaaagtgataactgaaggattaaaaaaaaaaaaaaaggtaaaaaccttcattctttgagaggggagacaattttccaaatgataagccttaataaaaacagcatgaagccaattaaatttggttttcaaaattttataaaccatctataaaattttaatcttgaccataaaatataacttccatgagccttttacaacctttataacatttattgaggagtcagttaatgcttcaagaaaaccttgttaatctgacacaggggcccatatgctagtcttgcatcagtgtgtctttgacattcatgattaatttatagagaaactgaacttgttttatctttcaaaagcagcccttacaatctcatgtgcccacctcttctgcaatagcctctggacctgaggagttgaatagctttaatttctggacttggtgtctgttttttttttttttttgagatggagtttccctcttgttgcccaggatggagtgcaatggcacatctcggctcactgcaacctctgcctcacaggttcaagtgattttcctgcttcagcctcctgagtagctggaattacaggcatgtgccaccatgcctagctaattttctatttttagtagagacagggttcctccatgttggtcaggctggtctcgaactcctgacctcaggtgatccactcgcctcggcctcccaaaatgctgggattacaggtgtgagccaccatgtctggccgctttttttcttgatatttgttagcaaaaattactggaagcagtttcagttcagccagcaaagccagaaataaaccttcactgtcctaccttagaggtatatcaactctccagctcattttttttttttttgagacagggtcttgctctgtcactcaggccggagtacaatcatggttctccatgactggagtgatacaatcatggttctccatgactggagtgatacaatcatggttcactgtagtcttgacctcctgggctcaagtgatcctcccacctcagcctcttgagtaactgggactatagacatacactaccatgcaccaccacacctggctaatttttatttttgtagagatggggtctcattatattgcccagtctggtcttgaactcctgggctcaagtgatcctcctggctcagactcccaaagtgctaggagtataggcataagccaccatgcctgtccaactccccagctctatgtcataatttagttttctgggatcttgattacctttcccttccacaagatatcacattgattgccaattgcaatcaccattacactgatgacattatgctgatcagacctagtgaacaagaagtggcaactattctagaccaagaagtggcaactattctagaccaagaagtggcaactattctagaccaagaagtggcaactattctagactttttttttttttttgagatggtggctcgctttgtcgcccaggctggagtgcagtggtgcgatcttggctcactgcaacctccgctcccgggttcaagcgattcttctgcctcagcctcctgagtaactgggactacaggcgcccgccaccacgcccggctaatttttgtatttttagtagagatggggtttcaccatattggccagcctgatcttgaactcctgaccttgtggtctgcccaccttggcctcccaaagtgctgggattacaggcgtgagccaccacgcccagcctattctagacttattcataagaaatttgtgtatcagagagtgggaaataaatctgacaaaaaattaaggatctctactttagtgaaatttgtaggggtccaatggtgtgggtcatgttgagagatcccttctatagtgaaggataagttgttgcatctggcccctccaacaaccaagagaggcacaacacctagtgatctttggatcttggagataacatattcctcatttgggtgtgtcactccagcccatttactgagtgacccaaaaagctgctagcttttaggggagcccagaacaagagaaggctttgcaacaggtccaggctgctgtgcaagctgctgtatcacttgggccgtgtgatctagcagacccagtgatgcttgaagtgtcagtggagaaagggatattgtttggagcctttggcaggcccctataggtgaatctcaatgcaaatcgttaggatttggagcaaagccctgccagccttggtggataattactctgcttttttttttttttttttttttttgagacagagtctcactgtgtcctccaggctagagtgcagtggtgtgatcatagttcactgcagcctcaacctcccaaggtataggtgatcctcctgcctcagccccccattgaggagctgggactacaggcgtgcactatcatgctaagttaattttttttttttttttttttttttttttagtagagatggggttttgccatgttgcccaggctggtcttgaactcctgggctcaaataatccacctgcctcatccatccaaagtgctgggattgcaggcatgagccactgcacccagcctactctgcttttaagacacgactcttactgaatttatttatttatttatttatttaattttatttttattttaagacggagtctcgctctatcacccaggctggagtgcagtggtgcgatcttggctcactgcaagctctgcttcttgggttcatgccattctcctgcctcagcctcccaagtagctgggactacaggcgcccgccaccacgcccagctaattttttttttttttttgtattttcagtagagatgaggtttcaccgtgttagccaggatggtctcgatctcctgaccttgtgatccgcccacctcggcctcccaaagtgctgggattacaggcgtgagccaccgcacccggcctcttactgaatttaaactgcaggaaaaaaaaaaagaaaaagaaacagctctcagcctgatactgagtctccatagagactgaacacttacccatgggccgccaagttactatgcaacctgagctgcccatcatgagctgagtgttgcctgacccaccaaaccataaagttgggcatacacagcagaactccatcatcaaatggaagtggtatatacttcagttgggctgagcaggctatgaaggcacaagtaagttacatgaagaagtggcaggccgggcgcggtggctcacgcctgtaatcccagcattttgggaggccgaggtgggtggatcacctgaggttgggagttagagaccagcctgaccaacatggagaaaccccatctctactaaaaatacaaaattagccgggcgtggtggcgcatgcctgtaatcccagctactcgagagactgaggcaggagaatcgcttgaacccgggaggcggaggttttggtgagccgagatcgcaccattgcaccccagcctggggaacaagagtgaaactctgtctcaaaaaaaaaaaaaaagaagtggcccaaatgtccactgtcgcgcctcctgttgtcacgggatccttggggtgtcactttgcccactggaaacctctgtggctggtggtgccttctgcccgagtactgctcatgcccactgggcttgttctgcccacttggcctggcaggttgtggtcagctcacactactggcccggatcccacacctgccaagggtgagccaggtgcagagtggcaaggggtatgtgagcgagtgagtgtggggtctagccactgcacacagtcaggcatgcaggttgctgcggcagggcaggtggcagctttagatgctggctccatgcaaggctgcagctggaccagctataccacacgtgtctggacaaggggaacatggtggtgcccagaagcttggagacgccaggaaccgtagagccccaaagagggtgtcacagccctggctcatggagcccctaggtctgggctccctggagggccccacagctcttctctccttcttgtcacccacaatgtggcaagcaggggaccatgtttcaggcctctttgtgttacagccctttcagtcccaccattcagcaggtcctgagttcttgtcccgcatccaggaaaaatgaggtatgcagacaactggagggtgagcaaggtggagaggagcttcattgagtgatagaacagctctcaggagacctgtagtgggtagctcctttccacaggtgggtgggtcatcctgatgagtgtccagctctcagtggagaggagacccatggtgggtagctcctttctgcaggtaggttggcccaatggctgtccagctctcagcagaaaggagacctgtagtgggtagcccctttctgcaactggtagtcccaacacctattcacatctggctgagtccaggttttatgggctcagaagggaggaaatatgtgctgatttgtccatgggtggctatgggtgggcctggaaaaagcaccataagttctcactccagggcatggactccacccagaactggcagcctggcttcaggacatccctggcctgaaggtggggtttcatcagagacccaccccttttcacccaggagcctgtctgcctcctgccaccatcaacgtgccacccaggctatttgtaccaaggggtgcccggaggcctgtaccgagcttcccttggcgcccccaccttggtctccctcctgtgctcactggtgcccaaaagtctggagagaactgaagcaggaggggctggcacgttggtggtgccctgatcatgtgcacacccacagggttgtgacaacaccaggctcagcttcaactttgctccaaaattggagcgtgtgctgggagaggggagaggccagggagcaagagcagacacttctgagcctgaaggagcatagtggcttcctggcccactgagaggacagggatgccctggtccagagccatggctgggtggctgtagctgcacccaggagtccagggctcctgccctgccaactcagtagggggcggggctcctgcatgtttctagcccccactggcttcacagtgtgcgcagccctggactcacctttcccactgcagctagcattcccacagtggctgctccagacaggccaatgccaccatcactgctacactacatttgtctcctagattgcccctgtgacttaatggggagttgcctgtgatcagttgacagaagggaagacttaggcctggttctgcatgaacatatgcaccacccaagagtgctgcagcactacagcccctttctgtgacatccctgaaggacagtgatgaaggaaagcactctcagtggacataacttatatttttaaattttttattaagagacaaggtctccagtctctttggtctagcctgcagaagtgagatgatgaagggaacgtcattgttttgaaagcattgcaataagacacacatgttgtgccactgccatggctctaaggcctagcaccttcagaagtctacttgtgacaactatgactaccctgccaagtgcaagagaaagtgtaactggagtgcaaaggctaaaagacaaaataccaccaggactgattgcatgaagcacctgaaaattgtataccacagattcaagcatggattctgtggaggaacaccacctaaacccaagagagcagctattgcagcaactagtttatctgaagaatttcaatgatttttcactattattgtcactattattatttgtcaataaatgccatggtttaacaaaatctaaaaaagaaataaaaagagatgggatctcactttgttacatgaccaacaggttcatatgcctcctgcacagtaatagaccaattacagtgagacagcagggatgcagaagagaaaacatttaattatcatgggcagccagatgcggagctgggaggagattctcaacttcatgtcctctaggagttctgagctggggtttttaaggggattgtggaggatgagaggctggagaattgggatcgttgattgggcagcacaagagagataaaataatcaggacgtggaaactgcattctttggtgagtcagctcctcatggggtccttcagaccagctggtgtcggtggggtcctttagaccagctagtgtcagtgggtcccttcagatcagctggcattatggggttcttcagattagttgagtcagtggggtccttcagatcagctggtatcaattgggtctttcagaccagctgagtcagaccagctggggtccttcagatcagctggtgtcagtggggtcctttagatcagctgctgtcagttgggtccttcagaccagctcagttactggggtctattagaccagtcaagtcagtggggttcttcagatcagctggtgtctgtggggtccttcagatcagctggagtcagtggagtccttcagatcagctggagtcagaggagtccttcagatcagctgagtcagtgggatctttcagactagctgagtcagtgggatcgttccaatcaactggtgtcagtggggttcttcagatcagctgaagtcagtggcgtccttcagatcagctggtatcaattgggtccttcagatcagctaagtcagtggggttcttcagatcagctaagtcagtggggttcttcagatcagctgagtcagtgggtcccttcagactagcttagtcggtgggatctttcagatcagttggtgtcagtggggtccttcagatcagctggtgtcagtgggatccttcagatcagctagtatcagtagggtccttcagatccactggagtcagtgggtcctttagaccagttgaatgaatggcattcttcagaccagttgagttagtgggacccttcagaccaagttagtcagtggaatctttcagatcagctggtggccatggggttctcagctgaatagtttcctcagaatgcaggacctgaaggaccatctcaaagggaattttttttatttttttaatttttttaattttagagacaaggtctcactatattgttcaggctggtctcaaagtccagggctcaagcaatccttccacctcagcctcccaaagtgctaggatgacaggcacaaaccgcctcacctagctcaaagggaaatcttaatgtttcataatatttaggtgttatctataggatagtttaggggaataatttaaggtctacatgattttaggacaataggcaccaaacaaccatgaagaagcagatcagggagcaggctgacctattgatcaatgctgagtgtgctgcaagctgggttaattttcatttatcccctatcttcttccttggttacttttataaaatttatagggtcagtgtcagctatgttcgtagggtggtcttgagctcctgggctcaagcaatcctctgcctcaccgttctgagttgctgggattacaggcttgcaccatgcacgtggcccagtgggcagaagtttaagcagtttaagtccgttcacttttcttgaaaagatagacaccagatgtgcaagtatattctgattcatgttctgtggtcaatggtttggatggatgatcagggacttggaaggaacatgattggataattggtgacaaggaaatttggggaagaggtatatggatagacatcttgaatgggaaaataaagatatttgtgtcccatgtgaatgcttactagagggtaatctcagaagttatctattaaaataataaattgattggataacccattctgtagataccagttagccttattctctaggaacccctgccgttgcccagtgggctcatgaataaagtggccatggtggccaggatggacattatgcatgggcttagtaacatggacttccactcaccaaggctgacctggctacagccactgctgaatgccctatctgccagcagcagagaccaacacagagtccctgatatggcctcatttcccagcatgatcagccagctacctgatggcagattgattacattagactattttcatcttggaagaagcagtattttgttctcattggaacagaaatttactctggataacaattttccatccttacatacacagcttctgccaaaattaccatttgtggacttatagaatgctttatccattgtcatgatattccactcagcattgcttctgatttaggaactcacttctcagcaaaagaagtgtagcagtgagcccatcctcatggaattcactggtcttaccatgtttcatgaaccaatgggcttgataagatgataggattatttgaagatgcagttacagcaccagctagatggcaatatattgcagggctgcagcaatatgttctccagggggctaaatgtgctctgaatcagcatccatcatatggtgctgtttctcccatagccaagattcactggttcaggaatcaaggggtggaaaagggagcagcaccactcactattatctctagtgacccactagcaggatttttgcttcctgtttctgaaaccttatgctatgccagtctactggtcttagttccaatgggaataattctcccaccaagagacagcaatgattcaattgaactggatcttaagactgccacccagtcacttcaccctccttatacctctgaatcaacaggcaaagaagggaattactgggctggttggtgattgatcctgtctaccaaggggaaattggactgcctcttcacaatgaaggtaaggaggaacatgcctggaatacaggagacccctgagagcatctcttagtattgtcatgcctgtgattaatgtcaatggaaaactacaacagcccaatccaggcaggactactaatggcccagtccctgcaggaatgaaggtttggttcactctaccagataaagaaccacaaccagctgagtgaggtgcttgctgaaggcaaaggacatacagaatgggtagtggaaaaaggcagttataaatatcagctatgaccacatgatcacttacagaaatgaagactgtaattatcataagtacttctcgtttttttaaaatttatttttaatttttaaattaattgttattaatagaaatggtgtatcaccattttgcccaggctggtctcggatgtactctccttgttttgtaatgaatatatataaaatatccttgttttctttcctctcttacttcctgttttgtaacataaaatgtattgactctatatcatagtatttaactattttaaattttacatcatagtgtttaagttatgagatatcaaggagaagaacaaacattatttaaggacttcgccttctcttctggggaagaggtagtgccttttcagttgtatgtagaatgattgtatcacgttgggtggaattatgaccttgtcattgtttttatttggagaataagaatggtttcagaagatacatttgggtgtcaagttgacaaggggtggacttgtgacagttaattttatgtgccaatttgactgggccatggaatgccaaaatatttggttaaacattattctggatatacctgtgaaggtgtttttggatgagattaacatttgaattggtaaactaagtaatgccgattgtcctccccagggtgagtggggctcatccaatccatggaagggctgactagagtaaaaggccaagtaagggaaaatttacactctgtctttgagctaagatattattcttctggttttggacccatagagtcagaataaaacttataccattggatctcctggttctaaggctttcagactcagactagagtccgacatatacgagagggtcttaaaaagtgtatgaaaaatgcatattatgaaaaaaactatgcatggattaaaaaaattttggccccaaaataaattcttactaactttattataacatgtctgaacaggatctagtttgaggcactaggaagggtaagaaatcagtttgaaaagagccccttgctctgtggctgggtagtgctggaggttagcttcctctaggccactgagctctcacgtcactgcagaaggccttatctgcagagacttcccatgccaagcaggcctgccccgtcagagagaatggcagaaagctcgtgtgtgtcctggggagatggtcagagggagccaccttccagctgaaccccaataagtactcgtagctcacggtgtaaacgccctccagaggttgcagctgtatacccaaaggtcccggccagcccctgtgcgcccctgtgttgactgggtttggggaggacacagatgggggcgtaggaggtgtgtagccctgactcagcttcctggttgcatcctagtctagtgttgtttgaagtcacgtggacgtggcctccccttagaggctggtgagggcatttgagggcagttgtgtgctcctggcctggggctgtgcttttgtggctgtgtgtgtgtgtgttggcgggggagggagggaggtgccctagttgtgcacggtactctgcagcccagcgccctgccgaggcttctgctgagaggagacagcgtgctggcagtcctcagagccctcgcttgctcttggcacctcctctgcctgggctcccactttggcggcatttgaggagcccttcagcccaccactgcactgtgggagcccctttctgggctggccaaggctggagcccactccctcagcttgcagggaggtgtggagggagaggcgcgagccggaacccggactgcgtgcggcgcttgcgggccagctggagttccaggtgggcgtgggcttggcgggccggcacttggagcagccggccagccctgccggccccgcgcaatgacttagcacccgggccagtggctgcggagggtgtactgggtcccccagcagtgccagcccaccggcgctgcacttgatttctcaccgagccttagctgccttcccgcggggcagggctcgggacctgcagcctgccatgcctgagcctcccaccccctccatgggctcctgtgctgcccgagcctccccgacgagcgccgccccctgctccacggcgcccagtcccatcgaccacccaagggctgaggagtgcaagcgcactgcacgggactggcaggcagcttcacctgcagccccggtgcgggatctactaggtgaagccagctgggctcctgagtctggtggggacgtggagagcctttatgtctagctcagggattgtaaatacaccaatcagcaccctgtgtttagctcaaggtttgtgagtgcaccaatcgacactgtgtatctagctgctctggtggggccttggagaacctttatgtctagctcggggattgtaaatacaccaatcggcactgtgtatctagctcaaggtttgtaaacacaccaatcagcaccctgtgtttagctcaaggtttgtgaatgcaccaatcgacactctctatctagctgctctggtggggccttggagaacctgtgtgtcgaaactctgcatctaactaatctgatggggacgtggagaaccttcatatctagctcagggattgtaaacgcaccaatcagcgccctgacaaaacaggccactcggctctaccaatcagcaggatgtgggtggggccagataagagaataaaagcaggctgcccaaaccagtatggacaacccgctcgggttcctttccgcgctgtgaaagctttgttctttagctcttcgcaataaattttgttactgtttgggtccacgctgtttttatgagctgtaacactcaccgcaaagatccgtagcttcagtcctgagcccagccagaccacgagcccatagggaaaaacgagtaattacagacgggctgtcttaagagctgtgacactcaccgcgaaggtctgcagcttcactcctgagccagcgagaccacgaacccaccaagaggaaaaaactccgaacacatctgaacatctgaagggacagactccagacgcaccaccttaaaagctgtaacactcaccgcgacggtctgcggcttcattcttgaagttagtgagaccaaaaattcaccaattccggaaacactgcgaggcagcagcgtgtcttacacagacggaaccgccgttcccctgccatgttcaggcgggtcggcaggctttgttcgttattctgagtggcagtcgggaagggcagctgaaccccgcccggggatctagagttgctggtcaggaactggagagaggcctggcgggcctggttgtgtttgtatttgggctttctctggggccgtggagtgataggaaaggttggcgtttcccttggagatgcaccttttctagtgattgtgtttgcagggtgagtctgacccgctgagccacaatgagcaaggacaaggaatatttttcaattaacttcttaattctcgtgagtgtggcttatgatctcctttgtggtttgttgattataaggcgcaccctgacgttagaaataataaaatgagtgtgccttagcatcagagtgtcaccatctgacgctctaggactgggcagagcccaggtcctcttctctggagtactcggctaccaccttgccgtgcagggggctccctccctcccttcactgcacactctcggttacttctttctcaattccatccgcacagcttcctgcctcaaccttttctgccttctgcaggagcagatgttcccacaaggaacacgggaggtgccaaggttgggtttccagcataaggctgagccttctgccctcggtttgaccctgggtggcactgttagctggaggccacgagagctgccttggacgtgtggggccagcgagcagcggcccctcactcgtggagcattgttgcagccgggcaagtctgccattgctcatcctcttagtcttgctcccagctgcgacttgttcttacatgttctagatgcaaggcttttgtgtgtgtgtggtttgtaaatattttgtcccagtccatcgcttatcttttacatcctcttaaggggggttttgcagagaaaaggtttttttcttttcaaatttggtgaagtctgatttatcaattttcctttttaaggatctgattttggtgtcatggttaagaattcctcaatgactcccaggtcccaaagatttttcctaccttttctttgctctttctttctttcctttctttttctttctttttttttttagatggagtcttgctcttgttgcccaggctggagtgcaatggcgtgatcttgactccctgcaatctctgcctccctggttcaagcaattctgcctcaggctccggagtagctgagattacaggtgtgcaccaccacacccggcccaggctgcagtgcagtggcacgatctcggctcactgcaagccctgcctcccaggttcacgccattctcctgcctcagcctcctgagtagctgggactacaggcgcccgccaccacacccggctaatttttttgtatttttagtagagacagggtttcaccgtgttagccaggatggtcttgatctcctgacctcgtgatctgcctgcctcggcctcccaaagtgctgggattacaggcgttgagccaccgcacctggcttctctgtttggttttctataacattattcttttttttttatagagacagtgtctcattatgttgctcaggttggtcttgaattcctggtctcaagccatcctcctgcctcagcctcccaaagtgctgggattacaggcgtgacccactgcacctggccagcattcttttttttttttttaaactgttgaacactctgtaattattaggtaaaattaatagtacttcacaattatatatatcactttacagtttacaaagttactaagtagacatttgttttgatgccccaaaataaaatttaacttctttgtcctcccttctcccctccatcaaggaaagactaaggaacatttaatcagaaaaggcaatataagtgcatcaatctgtacagaactgcaaagaataaaggggaggagggtaggaccctgaagagggccacagggacttcaggaaggagaaaaccagagtgttaaacgtgaggaaagcccaggggtgacagggagttaaccaccataaggggcaggttgtattcactacataaaaggaggggcacacggcatatgtttcacattctaaaataatatgacaatatcataactgaagagctgaagttgaattttgtggtttctcagaacacaagtagaagatgaccaccaaccatggtttctgaataaactgagttcaaagtgcatctggttgcagcagggggcttccttggactctgatactagaaatttaacaaaggtaattcgaggagctgcgattttacatagtggtggcatcctagggggcatctatcgcatcagttaagtttaatatctggcaatcatggaaaaggagtttctgagcaggtaatacttgggccatctcttggagattcctgctgtaaggactaagtttctccagagaaagcacttgcctgggtatgactcagggccgggcaaaaattcacactatgaatctggtggaagggggagaagtatgcctggtgggaccacattcccataattctctaacctcacatctctgtagagttccctctgaacaaggtccaggtatctccattcctcttgagtaaggtgcacagccacatcctcagatgtcacaaactgctgatacctggctgtcaggagcgcagctgcctgatctcctgggctgtcctcatggggaaaggcaggcacctggggaacaggtggaaccctagtgagtccctgttccatgtcggtgtcctgcacaaaatgaggctttggagtcagactctcagactgggtctccaaaaactgaaatcggacccttggtgagcctgctgcttcctgggctggtattttctccatccctgttctggaggacaatgaccgtcgcagcttgcatcaggacatggccactgggtcctgatggcgaggcccgccctcggtctgtggggtgaactggggctgaagagaaataggcctttgcacccaagcatctgcacactcttggggaaggaaaccactgtcccatattctttacattatccttgtcatttaggatctccaggattggcttcagtgttaatgattctttgtcattattttcctgtaagagtgcccttttatctaaagatttcagttcatttatttgacagaaatcttcaaccatatatataaaaatatataaatatatatatatacttttttttggtgacagagtctcattctgtcacccaggctggagtgcagtggcgtgatctcagctcactgcaacctccgcctcccaagttcaagcgattctcctgtctcagcctctggagtagctgggattacaggtgtgcaccaccacacctggctaatttttgtatttttagtagagatggggtttcaccatgttggccaggctgatcttgaactcctgacctcaggtaatctgcctgctttggcctcccaaagagctgggattacaggcgtgagccaccatgcccatactcaaccatatctttgaatactttcccattccagttgttatattcttttctcaaaacaccaatcatgtatctccttgatccattttcatcagcgtctctgcgattttatccctttgcacttttccattttgttttgggtgatttttttcaagactggcctccatgtactatctatgttttcatagtatgtatttgacttcttgctgtttctataatgaacttttcatttttgtggtggctttcctgttatttccaatttctcagttaagttctaccacatcacttttttctctctaaaaatatgcatctgttattctcccttgtatcttttttttgaaaaagtccatgctttaacttttgtgagtatagaaaaaatatgtctgacatctttcttctgcttgctggaataactttctaaaaatagactttatttttatagggcagttttagatttacagaaaaattgagcgtatagtacagagaattcccatacagctcctacacggtttccccattattaatgtctacattagggtggaacatttgttacaatcatggaagtgatgttgatacattactattaactaatgtccataatttattcagattcccttagtttttacctaatgtcgttttcctgttccagggcctcctccagaataccacattacgtttagttttcatgtctcctaggctcctcctggctgttacactttctcagaccttccttgattatgatgacctcgaagttttgaggagtactgggaaagagtattataggatgccccctactggaatttgtcagatgtttttctcatgattatacagggattatggcttttggggaggaagatctcagaggtaagtgccattctcgtctcattgtattaccattatttatttattttttaatttttattttttgaaatggagtctcaccctgtcgcccaggctggagtgcaatggtgcgatcttggctcactgcaacccctgtctcctgggttcaaacgattctcctgcctcaggctcctgagcagctgggattacaggtgtctgccactacacccagctaattttttttgtattgtttttagtagagacagggtttcaccaggttggccaggctggtctccaactcctgacctcgtgatccaccctcctaggcctcccaaagtgttgggattacaggtgtgagccaccgcagctggccatattagcatgatttatgactgttgatgctgactttgatcacctgcccaaggtagtgtttatcagatttcccccctgtaaatttgctccctgtcccttccatactgcagtcttaggaaggaagtcactataagcagcccatgcttaaggagtggggagttctgctccccgtcctttacgatgggacagctacataatttatttggaattctacagagaatgctggggtaactttttctgaagtggtttttgatcatctgtcttttgtttgctattatttttcccttttcattggggagtggtttttgttcatatgtattaattcagatttgtttgcttattttgcaacttagctctcaaataatttgagggaagggataggggatttttttttttagagggaattggcagttctgactccctcatgttgtatctaaccaagaaccaagttgacatttcctctgctcgattacttctctctccctcttttttgcatccctcttcctccacgccacttttggaaaagcacctcagctccctgtggctgtcagggcttacaggtagatttcattcagatatttcatgtttaattacttgtatttcactgactcaacagcgataaaattggttgtgtgggcccaccctcctccctttgcctccctccaggcaattctctccactctggaatggggaaaataaaggaggcatccacactggtctgtcatcagccctgcctccctgctgctgtgcacactggggtcttgttgaggggtgttctctgcttcttccatgaccctcccaagcccctagttttcaaggattcttaattcttttaagaattgtaagggatctgctccaggtgaccttccttgttttggttccaattttcattacacttggcagatatttcttatggtcaattatctgggctgtagccattttctattttcattgcagataagagcttcttttctactactcattttactgttaattttggtatattcaggaaaggaatgagtaaacatgcctttactgtaccatcttttatgggaactgctcatccttaatctctgtcttcttcagctttgctggtgtgacttgctcttgatttttctcctactgctgtgctgtttctcaggctccttttccggctcctgcacctgcctgtaaattctgctattccccaggactctctcactggcccctctccccacccaccccacccctattctataacgagctcctactctactttggggcctacagaggccaggcagataatgtgattaagtgaagggaaatatcatttattttttcttctcactattgaccttggcagagtcatttattttttcatatggtgtcttcaatagaagcttttttcataacaatcttgtaggaatattctttatttccataaagatataggttctctccaactttttttttttttttttgagacggagtctcgctctgtcacccaggctggagtgcagtggcacgatcttggctcactgtaacattcgcctcctgggttcaagcgattctcctgcctcagcctcctgagtagctgggattacaggtgcctgccaccacgcctggctaatttttgtatttttagtagagatgggatttcactatgttggccaggctggtctcaaacccctgaccttaggtgatccacctgcctcggcctcccaaagtgctgggattacaagcatgaaccaccgcgcccggctatgttaggctattcttgcgttgctctaaaataatgcctgagactggataatttataaagaaaagaggtttaattggcttatggctctacaggctgtacaggcatggtgctggtatttgcctagcttctggggaggccttagggagcttttactcgtggcagaaggtgaaggaggagcaggcatgtcacatgaccagagcagaagcaagagagttagagtgggaagtggcacacacttttaaaacaccagatcttgagagaactcaatcagcaccaaagggatcgtgctaagacattgatgagggattcgctgtcatgatccaaacacctcccaccaggccccacttccaatattggagattacaattcaacatgagatttggtggggacatatattcaaactacatcaggggtctactagagaggggagggaggcagacaagggttgaaaaactaccttttgggaactatggtcattacctcggtgatgggatcaattatccccaaacctcagcatcattcagtatacctatgtaacaaacctgcacgtttacccccgaatctaaaataaaaattgaaattattaaaaaaaagataattgtaagtcgcttcaaaaaaatcctgtgtaggccaatatgacataaggcgaaccaaatagatttgctggccaggtttggccataggccacaaatttagagcctctggtttgacgtgttttatctcagtggccttcctttctgacggcttcacttgtgtggtgggaggctgagggtggcgacttgggattcatgtatttctgctctcccttgtgaaggggtgaggtgggattatgagtaatttatttgcatgaggcgcctcttgggaaataactcacccaaagagaagaaggcacgtggcaggatacgctcaactcggtaacaaaaatctcagggtcagagttgacgtgtggctctcctgcattgtactgtaactctgggagggccaggactgtgtccattttgtttacaccgtatagggtaagcatagagcctggcccaactgtagatactcaatgagtattggctgactgattgaattcatattactgccctgtgcatgtcccctaatttgatgttcacctcaaccctgatgaattcatgtctggatcccacaggccatatgtaaaaaatgcaggaatcgtgtcactgaaaactcagaaaggcattgggaatgctttcacactgccttggtgctccctaaaaagagtaaccaaaaaataaaaggaagtgttttcctcctctccattcctttcctcactctacactgctgtgcagctttagtccttgtgggcttctgtgtaatggcgggggcctcccaccaggagatgacactgctggggtgttctggtcctcactgtatagtgtggaaggtgctgggtgctaacagacagatgtgtttatgaacacggggctggagagcctaagtgggtggaagaagagagccagagaaacgttaataggaccccaggtccacccacaggatggaaaaatatgcattatacttggagtttgtggaagaggccactagctgctcaccaaatcctaattttctcatgtttctgggtacacatcctgtggttaggtgtggcctgtggttgggttccagccaagagaatatgagtagaagttatgtgtgccacatgtaggcctggcccatacaaacctcctactgtgtgactgtccatgttcttttctctccttgaccctgggaggaatgtgctgaggatggcagggcctttgctgtcctcctgggtctgtgaggggtgagccccactgaccattcggaaccattttggacattgtgtgtggggggaacaatacacttccatggcaggcacaatggctcatgcctgtaatcccagcacttggggaagtgggagcagggacatcgctggagcccaggagttggacaccagcctgggcaacatagcgagaccctgtctgtattaaggaaaaacaaacaaacacttccattatatttgagccaaaatagtttttaggtgtatttgttattgaagtgagcctgcctgactagtccagggactcagcacctgctactaggtacatctgcaacatgggcgttcaggagtggaagtggaggctcagaggccactgaagattttgagaatactcgtcagctatgacaaggcacaaggtgaagcgatgccctgagccagcgtggggtgcttggaaggattttcaaaagggaaggaaatatgaatgcagcttgtagagctttctaggaatagcagcaggaaatgcagcttcctgtaaagtgatctttaagccctctaatttggacacagaattcaaaaaatactgaagttcttcctagagaaagagttgcaaagtgtgtgacaaggaagcagtccaatctatttctgaataatgaaactgccctacaatttagtgcttaaaacaacaacgttcattttgaagaattatctctcatggttctgggtgctcacaaggctcagagaggtggttctcagagcgtcttctgtagctgcagtcaaaaggggctggagtcatcttgaaaaggtcttcactcagatgtttggtactgaattcatgctaattgacagctgcaacctcagtgggggctcaaccagaaccccaggacatggtctgggcttccccacagcatggcatctgggttctaagggtgagtgtcccaagaggactggacagatgcaggattgcccccaccttccctccccttccctcccctccccttcctttccttttcttccttccttcctttctttttcagagtctcgttctgtcacccaggctggagtgcagtggtgtgatcttggttcactgcaagctccacctcctgggttcacgccattctcctgcctcagcctccggagtagctgggactacaggcgcccaccaccacacccggctaattttttatatttttagtagagacagggtttcactgtgttagccaggatggtttctatctccggacctcgtgatctgcccgcctcagcctcccaaagtgctgggatttcaggcacccaccaccatgtgagttaattttttgtatttttagtagagacagggtttcgccatgttggccaggctggtcttgaactcctgccctcaggtgatccacctgcctcagcctcccaaagtgctgggattacaggcgtgaaccaccgcacctggccaggattaccttttcttttttccctcccctctcctcccctctcctctcctcacctattaagctaggaagtctaaggattgccttttctaatctaactttgaaagtcaaacagactccactgtgttctctattggttgtagcaatcacaaattcccaagccacattcaagggaagaggtgacatagaccccacctctcaatgggaggagggtcaaataattttgggacatgtttattttttattttattttttttgaggcagagtcttgctctgtcgcccaggctggagtgcagtggcgcgatctctgttcgctgcaggctccgcctcccgggttcacaacattctcctgcctcagcctcccgagtagctgggactacaggcgccagccaccatgcccggctaattttttgtatttttcttttagtagagacggggtttcaccatgttagccaggatggtatcgatctcctgacctcgtgatccgcccgccttggcctcccaaagtgctgggattacaggcgtgagcccccgcgcccggctgggacatgtttattttttaaaaagcttttagtttaggttcaagggtacatgtgcaggtttgttatgtaggtaaacttatgtcacgggggtttgttgtacagattatttcatcaccaaggtactaagcctagtacccaatagttattttttctactgctctccctcctcccacctccaccctcaagtgggccccattgtctgttgttctcctcttggagtccatgtgttctcttcatttagctcccacttatatgtggtatttggttttctgttcctgtgttagtttgctaaggataatggtctctaactctatccatgttcctgcaaaggacatgatctcattcttttttatggctacatcaatttaggttgattccatgtctttgctattgtgaatagtgctgcagtgaacatatgtgtgcatgtctctttatggtagaactatttatattcctctgggcatatacccagtaatgagattgctgggttgaatggtagttctcttttatttgagacagagtttccctttgttgcccaggctggagtgcagtggtgcgatctcggcttactgcaacctctgcctcccaggttctaagagattctcctgcctcagcctctggcgtagctgggattactggcgcacatccccacgcctggctaattttgtatttttagtagagatggggttttgccacgttggccaggctggtctccaactcctgacttcaggtgatccacccgccttggccccctaaagtgctaggattacaggcgtgagccaccgtgcctggctggtagttcttgttttagctctttgaagaactgccacactgctttccacaatagttgaactaatttacactcccaccaacagtgtataagccttctcttttttctgcgaacttgccagcatctgttatttttttgacttttttttttgagacagagtgccactctttcacccaggctgaagtgcagtggcatgacctctgcccactgcaacctccgtgtcctgggttcaagcgactctcttgcctcagcctcccaagtagctgggattacaggccttgccatcgcacctggctttttttttttttttttttaagtagagatggggtttcaccatgtgggccaggctggtcttaaactcctgacctcaagtgatccatctatgttgacttcccaaagtgctaggattacagatgtgagccactgtgcctggcctactttttaataatagccattctgactggtgtgagatggtatctcattgtggttttgttttgcatttctctaaagatcagtgatattgagctttttttaaagttctttggctgtgtgtgtcttcttttgaaaagtttctgttcatgtccctttgcccactttttaatggagttgtgtttattgcttgtaaatttaagttccttatagatgttggatattagaactttgtcagatgcatggtttgcaaaatttttgtcccattctttagattatgtgtttaccctattgatgttgtcttttgctgtatagaagctcttaagtttaattagatcccatttgtcaatttttgcttttgttgtgattgcctttggcatctttgtcatgaaatttttcccagttcatgtgtccagaatggtattgcctaggttgtcttccagggtttgtacagttttgggttttacatttaagtctttaatccatcttgagttgattttcgtaaatggtgtgaggaaggggtccagttttaatcttcttcatatggctagctagttatcccagcaccatttattgaatagggagttattttgccattcttgattttgtcagctttgtccaagatcagatggttgtaggtttgcatccttatttctgggctctccttatattctgttccattggtctatgtgactgtttttgtagcagtaccatgctgctttggttactgtagccctgtagtatagtttgaagttgggtaacatggtgcctccagctttgttctttttgcttaggattgccttggctatttgggcttgtttttgggtccatatgaattttaaaatagttttttctaactctgtgaagaatgtcattggtagtttggcaggaatagcattgaatctgtaaattggtttgggcagtattggccattttaatgatattgattctttctatccacaagaatggaatgattttcaatttgtctgtgtcatctctgattttttagagcagtattttataatactcattgaagagatctttcaccttcctggttagctgtatatattcctaggtattatgttctttttgtggcaattatgaatgggattgcattcctgatttggttctcagctaggttgttgtttttgtataggaatgctggtgatttttatatgttgattgtgtatcctgaaactttgctgaagttatttataagcttaaggggttttgggccaagactatggggttttctagatatagaatcatatcatctgcaaacagggatagtttgacttcctctcttcctatttggttggcctttctttctttctcttccctgattgctctggccagtacttccaatactatgttgaataggaatggtgatagagggcatccttgtcttgtgctggtttttaaggggaatgcttccaacttttgcccattcagtatgctgttgattgtaggtttgtcataggtgactaattattttgaggtatgttccttcaatacctagtttattgagagatttttttttaacatgaagtgatgttgaattttatcaaaagccttttctacatcttttgagataatcgtgtggtttttgtctttagttctatttatgtgatgaatcacatttattgatttgtgtatgttgaaccaaccttgcatcccagggataaagcccacttaatcatggtggataagctttttgatgtgctgctggattcagtttgcaagtattttgttgaggattttgcattgatattcatcaaggatattggcctgaagttttcctttttttcttgtgtctctgtcaggttttggtatcaggatgatgctgattgcatagaatgagttggggaggagtccctcctcctcagttttttgggttagtttcagtaggaatggtactagcttgtcttcatacatctggtataaactggcaataaatccatctggacctgagcttttttgtagttggtaggctatttattactgattcaattttggagctcattattggcctgttcaggcagtttgttcctggtttagtcttgggagggtgtatgtgtccaggaatttattaatctcttctaggttttctagtttgtgtgtatagagatattggtagtagttttttgctggttgtttgtatttctgcggtgtcaatggtaacatcccctttgttatttctaattgtgtttatttgaatcttctctcttttcttctttattagtagcctatctatcttattaactttaaaaaaaaaaccctcctggatgcgttgatctttgaatggttttttgtatctcaatctccttcagttaagctcgattttggttatttcttgtcctctgctagctttggggttggtttgctcttttctagttcttttggttgtgatgctaggttgttaatttgagatctttctaacattttgttgtgggcatttagtgttgtaagtttccctcttaacactgccttacctgtgtcccagagatgctggtatgtggtatctttgttctcatttgttttaaagaacttcttaacatctcccttaattttattatttatttacccaaaagtcattcaggagcaggttgtttgattccatggttttgagtgattttttaaagtcttggtttctatttttattgcattgtggtctgacagtgtgtttgttatgatttcagttttttgccatttgctgagaattgttttgtgtctgattgtgtggtcaattttagagtatgtgctatgtggcaatgagaagaatgcatagtctgttgttttcgggtggagagttctgtagatctctatcatatccatgtggtccaatgctgagttcaggtcctgaatatctttgttaatttcttgccttgatgatctgtctaatactgtcagtggagtgttgaagcctccaactattattgtgtgggagtctaagtctctttgtaggtctctaagaactcgctttatgaatctgagtgctcctgtgttgggtgcatttatatttaggatagttatatcttctggttgaatttaacactttaccattatgtaatgccccggtcttttttgattgttgttggtttaaagtatattttgtctgaaattagaattacaatccctgatttttttctgatttccatttgcttgatagatttttctgcatccctttatttcaagcctataggtgtcattgtgtgtgagatggatctcttgaagacagcatgagatcttgcttttttatccagcttgtcactttgtgccttttaaatgggggtatttagcccatttacatttaaggttattattgatatgtgtggatttgatcctgtgttgttagctggttattatgctggtttatttgtgtggttgctttatagtgtcactagtctgtatacttaagtgtctttttgtattggctggtaatggcctttcctttgcatatttagtgctcccttcaggacctcttgtaaggcaggtctgatggtaacaaactctcagcatttgctgatctgaaaaggatcttatttatcctttgcttaggaagcttagtttggctggatatgaaattcttggttgaagattttttttctttaagaatgttgaggccgggcgcagtggcttgtgcctgtaatcccagcactttgggaggccgaggcgggcagatcacgaggtcaggagatcaagaccatcctggctaacatggtgaaaccccgtctctactaaaaatacaaaaaattagccgggcgtagtggtgggcgcctgtagtcccagctactcgggaggctgaggcaggagaatggcatgaacccgggaggcggagcttgcagtgagccgagatcgcgccactgcactccaacctgggcgacagagccagactccgtctcaaaaaaaaaaaaaaaaaaaaaaaaaaagaatgttgaatacacgcctccaatctcttctggcttgtagggtttctgctgaaatctattagcttgatggggctccctctgtaggtgacctgccctttctctctagctgcctttaacattctttcattttgaccttggaaaatctgatgattatatgtcttggggatgatctcgttgtgtagaatattgcaggggttctctgtatttcctgaatttgactgttgacctctctagggaggtcggggaaattttcatggacaatatcctgaaatatgttttccaagttgttcactttctccccatccctttcggggatgccagtgatttgtagatttggcctctttacataatcccatatttctcaggagttttgtcattccttttccttcttttttctttatttttgtctggctatcttatttcagagtgccaatttttaagttctgcgattttttcctcagcttggtctcttctgctgttaatacttgttattgcattgtgaaattcttttattttttattttattttgtttttgagacaaaatctcactctgttgtccagactggagtacagtggcatgatcttggctcactgcagcctctacctcccaggttcaaatgattggcatgtctcagccacttgagtagctgggattacaggcgtatgccaccatgcccagctaatttttgcagttttagtagaaaaagcgtttcactatttggccaggctggtcttgaactcctggcctcaagtggtccacctgcatcagcctcccaaagtgctgggattacaggcatgagccactgtgcccggctgcattgtaaaattcttgtagtgtgtttttcagctctatcagatcagttaggttctcttttttactggttatttcatctgtcaggtcctgcatcattttattgtgattcttagtttccttggattgggttttgccattctcctgaatctcaatgatcttcattcctatccatattccgaattctatttctgtcatttcagccaactcagcctcattaagaacccttgttggagaactagtgaggttgtttggtggacataggacagtctggccattggagttgctggagttcctgcattggttctttcttttctctgtgcgtgggtgctcctttaactgttgggctgcctctgattaaaggggccaggtaagggcgtggtggttgtgctggaatcccaggccagacagcccttcccaatgagcagaaggtacatgcattggcattcatcaagaaaacaactcgacccacagagaacagagaaaacaagacaggatgaccacccacccgggagtgacacctagtaacaacctcagttcaaaagtctgctgagggtgctgccttcagctgaaatgaacatgagggtgtggggaaagccctccttaggaagaaggctttttaggtcttagtgagtccaaaaaagaggagtggcagaagtcataaaagaggcacacgatggaaatgtctgtcctttttaatatcatggaggctgctagagttctaactagggagagctcaccaactaacaaggcactgaagagcccacagcttggggctcatggggacaaggtcaggagatggtgggaggggatgcaaatttagaagttccacctacgaggatcccgatatggcaagtacaaaatgcccaattaacctttttctacatgttttcttccaatggtgtttaagttcacaggacatagacttttttttttgacagggtctcactctattgcccaggctggagtgcagtggtgtgatcacagctcattgcagccttgacctccagggctcaagtgatcctcccacctcagcctcctgagtagctgggactacagacatgctctagcatgcctggcattctttcttttttttgtggagatagggtctcaccatgttgcccaggctgatctcaaactcctgaactcaagcaaccctcctgctttggcctcctaaagtattggtattacaggtgtgagccaccacacctggcccacaggacatggattctgaacaactggcataaatcgactggcctcaaggtaaggttttaaactaagcttaagcttttctgttgccctcagataccactgaatttcttcttcagattttggtgacattaagtggtggtttctggaaatacaattttaattttgcttgggatgattgtcttggggtctggggatagctcattttctaaattttgtggttgtggggctggtgttgcaatattcttgtgtctcattaactttctggaattttaaaaacagactcatggaaggtttgcctcagaactcagtctttgaagccttggaggaactaacctgttccagcccaggccgcagcttcggaagggaccacagctctgcccagggattggaaacccactagctgggattaaacagaacacaaattggaactgatagttttgtgactttaacatagacactttgggcttcaattacttttgactttaatgtcatagtttcagtttgcaatgggatttgaactttaattttggagtttgattaatgggagggttatttgttgttcaaatttgaaaatgggagggttatttgttgttcaaaacctttattgttggcaatcccttgttggagcttcttaataccatcatttaatctcattgtggatctccgatagctacttagataacatggctgcatgaaattttattttatttatttttgagacagggtctcactctgttgcccaggctggagtgcagtggtgtgatcatagctcattgcagcctcaaaatcctgggctcaagttatcctcctcccttggcctcctgagtagctgggactacaagtgcgtgccactatgcctgactaattttttgactttttgtagagatgaaatcttgctatgttccccaggctggtcttgaactcctggcatcaagtgatcctctctttttggtctaccaaagtgctgggattacagcactttggcatgagccactatgcctgaccaatgaaatttgaggtgggaaacggagcacccaggctgaagtgcaatgctgtggtcatagctcactgcaggcttgaactcctgggctcaagcaatcctcctgcctctcagcctcctgagtagctgggaccacaggatggctaatttttaaacttttttgtagagatgaggtctccctatgttgcctaggctggtcttgaactcccagcctcaagcgatcctcccgcctcagccttctgagttgctgggattacaggtgtgagccactgctcctggcaatgtatttcaatttcgtggcaaaattgcagaaatgaacataaaacacaggtgaggataggagagtctaacttttctggcaagatcgggcagtgttgagctccaaggaaaaggagaaggaaccctggacacattgataaggcgtcctcttttccttggtattaactgaagcatgctcttgatggggaggaagctgctgctactgctgccgtgtttggtgtttggagaagttaatatggtttgttatttgttaaaagcttactgagtaccaggtatatgctgaatgcttagcatacgttattttgtttaatcttggccacaatgggccctgacagtgatagctgtgtctgaagtaggtgctattattcccattttacacctgataaagctggagctcagagaggcatagtaactttttcaaggtcacacggctaaaatgaaaggtaatgaatggtttgaattcactttggcacattcaatcaaccaatcctcagatactcactgagcgtgttgtatcagccattatttttagttgcaagcagtagaaaccaactctggctgagtttagcagaagatgaatttattaaagggaccctggattgctcatggaaattccaggggagctacagagccattgtggaagcttcccagcagggacaatggtcagaacctggctgccgctgctgccacttctttgaccatggcctggatgcttcggcttgcaatgcttacccactggggctggatgctgggtgctgctgagaactctacctcctctgtgatcttgctgtggccaccactgtccctacaggctctagggtccctgcttcctggcattactggctctggattgaaagcctgggcctctgatgaatggaacgtgtgtgcatgtgaaactgcctttgcaaagatgatgacagtgagggaagtctagcatgggtgactccatcttgcctctaccctcacaggctggctgtcctcactcattcctgggcataggccaagctaaccatgggaggaatttagtttacagtttaactctgaagcaaagatgatattagtccctccctaaaatgaaccccctcctagctcagggacctgcctttgtaaaactaatgaaaggccacaagattaggattatgggaggggcttgaattttgctaagatgtgggtgtagctaaccgatgaccagccattgacccctagcttgcctttctataatcctttgctgctcaggagtcatgcggccagaggtcacaagatctgtgacttccccaattgctcctatagataacatcactattgtaaaaccaaatattggtcttctgagatatttttcagacttttgcattctgaaatgattcatgactcaactggtcctgtgacccccacccagaggtggacttagtgcacaaggtctgttttctacactcctatgattttatccccaacgaatcagtagcacccattctctgctcttaccgcccaccaaattctccttaagaaccctagcctctgagttcttgtggggactgatttgagaaataaactcccatcctttcacttggctagctctgtgttgttaaactctttctctactgcaataccatggtctcagtgaattggttttgtctacgcagcaggcaggaagaacccttcgggtgattacaaattagcctgctccagagctgctggaggtgggggtgacacacttcttgtgcctgtgtcttctttcttgggaggtcggctctgttcccaagactgatatcatggggaactcctctaatgtggcaaagcagtttgaatgctgggcagccaggggagtcacagatggttgcatacacatctgtgttctgcatgacactgctagacatggcggacaataccaagacggatcagacccagcacctgtcttccgagaccttacgggctcatgattctcttccttttaacatgcacatttattaggtaccatagtgtgcaaagcttgttcactcgaattatttcattaggtccatctgatagtcatgtagggtaggcagaactgataggatttctgttttatatttgaagaaactaggtctgtcaatagtgagccaggtttaaaaaaaaaaagaaactaggaagttaggtgatgagcctaagacatcaccactggtgaggagcagagctgggacatgagcctatcttctgactccaggcccagtgctaagccaactaaaggggcataaaggggagctgagatcagggaaggctctgtggagtggcactgcccctcagtcccttgtctgcaattctaaaatccaaaggactctgaaaacaaagtctctgtcttttttttgtaatgggatctcattctgttgcccaggctggagtgcagtggtgccctctgcagcctcgacctccctggcacaagtgatcctcttgcctcagcctcctgagtagctgggactacaggcgtgtgtcacaatacctggctattgttttttgtttgtttgttttcaagtttgggactaaaactcaatttggcagcaaaacctgacccgaactgatgtgatttgtaatctttagttatccatttaccgtaagatcaatgtgtttagctgcagaaatcttaatgtttgttaatagggggttatcctggtccataaagggagggagaggaggaggtgttacctaatattgggtccatggactacatagcctaaaaaaatctataaaatttcaaaacacacctggcttcaagggttatggataagggagtctgggttggatctgaaagggggcttggttgtggggtagaatttcgatgtttggaagggatgtggagggatgttatgaagaggaagcctcacgccataccaccttgggtcttggtgttaagtcattatcaaccattacatttgctttaaagcagagatgacttacatttctgataactactttcccttaattcatgattcacacacatttggagggctggactttctgggtttggttatttcccctggtaccaatccccgccttttcccagaaatcacttgactttcccgaaaactcagaaacacaccctttggctgaaaaatagcattaagcaatcggtgaaattccccattcctcctttccccgctggagccctggatagagggctctctggcctgggaggaggacgctgtccttgtttcaaaagcagagggagctccaagatcaaggctgagtttccctaagtcatggtctcccagccccctctgtttagatcagggaatttcagacatgcacactcgggtagggaatcttatgaacagaaccaggacagggaggctggccggaggttcctgcagagggagcgtcaaggccctgtgctgctgtccctgggggccagaggggttgcccagcatgcccactggcaggagagagggaactgacccacttgctcctaccagcttctgaaggtaaaatccttacaaacgaggagcagagctttgatggaggaaaaaggaaaggcagaaaacttcacgtaggagggcttggggcaatgatagagggctgacaaaggcagcataaaaaaaggcagaatatagacaacctatttctcttaggctcaccccatccacccctacttcacccccttacctaccactgttttcagggttaaagcaattttagcaaccctttactaggaactgtggggagatagcttgtattttcagtaagttggcggtggggggcagggacaaactccaaacaaactctggaaaacgaatgtaggaagtttttatgttccttgtcatttggctgtcccttttctccttcctcgcacaaccctgtatcagtggggcagcacttccttctcagaccgcttgtcccagggtccctgccttcccctagtgaaagaagctcctgcctccatcggtgggcgttgggagcatcagcggagatgcacgcaatgataaacagcagacagggctgcttgaggagatgaggtgatcacggttaaagaagaggggctgtcctacatggatgatcatgatgcgccaagactgttgaaaacctgagtggaaatgggagcatcgttcttgagggcaggagagagactgataccgcgggggtggggctggtggaggacaatagaggaagaagaaaactgggagaaagtactcgattcctttggagaaaaattaggagaaagtctagagaagcaatgagggaaggatacaatttagctatagtctagaaagttagtcgaagttaactagggagggtgtgaggggcacggtgccatgtggggatgttggtgatatggccctgtgtgttatacctttgaaggtgacactgagccccaggtgacgccgcaccaccaaagaaggtgcttgtgtttgtcagacaaatacagccaggcctgccaccccttaggctccaaagtccggaggtgcagaaagccaggaccaagagacaggcagctcaccagggtggacaaatcgccagagatgtggtaagtgatcaagggtccctgagatgacacagactccattcccttcatcttctcaagaaaagcgctcaagggccaggcatgatggctcacacctgtaaccccagcactttgggaggctgaggcgggaggattgcttgagcccaggactttgagaccagcctgggcaacataaggagaccctgtctctattaaaaaaaaaaaaaattagcccagcgtcatgcgtgtcacctgtggtccctgctactcaaaaggctgaggtggtagaatcacttgagcgcgggaggtcaaggctgcagtgacctgagatcgcaccactgcactccagcctgggtgacagagtgagaacctgtctcaaaaaaaaaaaaaaaagggctcttgtctgaagcctgggttttggtttgacctgggccttttctttattccgacctaagattctcccccatggccgattgactgcctctcttcttccccctttcttctgcctctggcaaatagcgcgttctgtcctaggctactggtgcctggtcacccgccaatctatgcctctgttttttcaggtgcattgtcctgttttcacttttggcatgggtttatgctgagcctaccatgtatggggagatcctgtcccctaactatcctcaggcatatcccagtgaggtagagaaatcttgggacatagaagttcctgaagggtatgggattcacctctacttcacccatctggacattgagctgtcagagaactgtgcgtatgactcagtgcaggtatgttataagcacaaaaagaatagagatggaagactagggctaaggtagcggaataaggatgtgggagggagtgccacctgtactcacagtgaactggagtcaagtcctagtggcataaatgttctattctctctgtcccttcttttaactccataccaaaatattaccctttcctagattttttttttgtgactcttctcttagataatctcaggagacactgaagaagggaggctctgtggacagaggagcagtaacaatccccactctccaattgtggaagagttccaagtcccatacaacaaactccaggtgatctttaagtcagacttttccaatgaagagcgttttacggggtttgctgcatactatgttgccacaggtaaggctcacccttctgcatgtgccttattgacccagctaaaagattagaaatgagaaatccactgagcaacacattgaatgaggattctgttcgtaattcttataaaaagtgttgacttggcctgggtcgctccataaatcacttttgtgaaattcaaatgcatgatcatatcttagtggtgatgatgatcatggtaataacacatagtacataataaacagcaatttgttgagagccactataaactgggtatgtattggggattggggatttttcctattttaacacaatcgtcactttaatccttcaaggtaggtattatttgctccatataaagatgaagaaaataaggactaggaaagttaataacttgccaagaatcacacaaggaatgtgtagtatttaaacccattcaatatatggcattcaaaccttcaaattctgggtacttctgtatctctctctaggttaaaatgaagctaggacatctcataaagccaaactattgtttagatttgacagaaggaccaacatcatataaagcaatgaatgtactgattcctccctgcagaaggcatcgtcatgatgtttaccttgcagagtgtcattcctggagctgaaatgctctgtacatgagaaaagtcaaggatctctgacattaagagctgcctaggccgggcatggtagctcacacctgtaatcccagcactttgggaggctgaggcaggtggattaccggagcccaggagttcaagaccagcctggccaacatggtgaaaccctgtctctactaaaaatatgaaaaattaaccaggcatagtggtggtgcgtgcttgtgttcccagctcctcgggaggtagaggcgtgagacttgtttgaacttgcttgaaaatgtggaggttgcagtgagccaagatcccaccactgcactccagcctcggtgacagagtgaggctatgtcacttacacacacacacccccgagcttccttatagctgtgtagtggtagggctcaactctggaatcatatgtcaggagagtaatatggaataatagtagcctgaaatgtgatcccttgacggatctttaagcaataggcctttcctactttttcttacccttatggttttggatttaacctcattctcccttcttggtgtttgttcttgacctcagcctctttctactctttgtagacataaatgaatgcacagattttgtagatgtcccttgtagccacttctgcaacaatttcattggtggttacttctgctcctgccccccggaatatttcctccatgatgacatgaagaattgcggaggtgagcttggtgttaagagggttgcatgttccctgggatttggaatggctgaggcctcagaaagggctttgtccacccttccaacttcgattaggccaagccttcatttggcacttcttttttattttagaatttatttatttatgtattatttttaataatttcaatagttttgggggtactggtgtttttggttacatggatgagttccttagtggtcaattctgagattttagtgcacttgttacttgagcggtgtacactatacccagtgtgtagttttctcgcccctgtttcaacctcctcccacgttgagtccccagagtccattatatcactctgtattggcatctattcttagttactcataagctgagatgaagccacaagaaggaggaagataagactatagggtaaagttagttaattggataagagagatagatgcctgtaaagggtctactgggggctgttcataaccagaaaggctccatcctaagcaaagtgatggaaacctaatagggattgggtattcctactgatacgtattgcacgtgtaattgctctatccctccagttagggcagggatctcaggttagtttgaatgcaggactgtcagtttctgagagaaggaatcatagaatagtgcaggaattcctttgcttgaccctgtatttgattctccctttctctttttctctgttagttaattgcagtggggatgtattcactgcactgattggggagattgcaagtcccaattatcccaaaccatatccagagaactcaaggtgtgaataccagatccggttggagaaagggttccaagtggtggtgaccttgcggagagaagattttgatgtggaagcagctgactcagcgggaaactgccttgacagtttagttgtgcgtgatggttgattaataccccacccttaacttacacagagagatctctccctgaagacaaatttttttttcatacagcatctttctctgttgctcaagctggagtgcagtggtgcaatcacagctcactgtagccttgatctcttgggctcaagcaagcgtcccacctcagcctcctgagtagctgggcccacagacgtgtgtcatcaaacccagctaatatttttattgttattctttttttttttacagagatggggttttgctatgttgctcaggatagcctgaaactcctagcctcaagcaatgctcccacctcggcctcccaaagtgctgggattataggtgtgagccactgcactcagcctgaagataaaattatcttttctcctgacccttattttcttcttattttatgtgacatttaatgcctcttttatttgtatctcccacttcccaattttacctcttccctttagttctttccctcttctgatttcatcattttgttcagtttgttgcaggagatcggcaatttggtccttactgtggtcatggattccctgggcctctaaatattgaaaccaagagtaatgctcttgatatcatcttccaaactgatctaacagggcaaaaaaagggctggaaacttcgctatcatggagatcgtgagtaacttagaagtgcctctttggttggtgataccaaagtccccaaacaatgtgggatcaaagcaggtagatgatccaggcacactggaagcacctgtgatctcagctaccgagggaggctgaggcaggaggatcccttgagcccaggaagtaggagtttgagtccactctgggcaacagagcaaaaccttgtctctaaaacaaaacaaaaacaaagcaacaataatttaaaaaacagatagattgttgttctgatagaatcctgagatacttcacttcttcaggaaaatctaaaccagtcaacggttgctagaaatgcctcaacctctagtaatcctttaactagacctgagactgcagacagcttgcgggtggttagttggtaatgccatatgattttagacatctgctgtattggaatgttaagcatcaggattgaggacaactggacgattttagaaagtgtgagaatgatgtaaatagaatgagagtcttcaactatttagtaattttttcctcctgtcccaacttctgttctttcaagcaatgccctgccctaaggaagacactcccaattctgtttgggagcctgcgaaggcaaaatatgtctttagagatgtggtgcagataacctgtctggatgggtttgaagttgtggaggtaaagtaccaccttggcttctccccagtccctggccccagatcaggatgagcggactgaaattgtccagttgtttacccaatgtatgtgtgtgatcaaggtataacacctttcccataaacacaacagcttaagatctgtagttctcccttgtgagtcatggagctgcctggccagcttggcattctctctgccttcagtcttcttgaggaaggggagttgacacgttggggcaaagctttctgtcagcctcatctcctgggtgctttaggtctgctaagatgttcccaagcttcttgtggtgaggactcctcattgatccaaggccagagatcaattccagttttgattttggtttcccatatctctcttcagaaataagtggtgatgtttattattctccagggacgtgttggtgcaacatctttctattcgacttgtcaaagcaatggaaagtggagtaattccaaactgaaatgtcaacgtatgtgtctcttcaaagtggaagtctttctttttctctcagagagaatggaaagatcagcacatcaaaattcaaatgcatggtttcctcttaggcatgtgagggagtgggttgggtttttgaagggaagccagtcatggaagcttttctagtcccagccccgcatctggtcccaggccaactagatcggcatgtttctttccaagaaaggggctatgggataggtcgagttagtagccccacgtgggtgcatttgtggcttccactgggccttcaccaaccactgagaaccaggctcttcactacggctttcatggggccatctgaattggcatctcagcgggtgagagagctgagagatgccagttggggaggatggccacagagaggctggtgtggggaggttcatcccaggtgtgcctgtggatatggggtggggaagcagtgaggatgaacctggccccatgactcttccttggaggaagtggctgtcctgaccatcgctctccttccttcgtctggtagctgtggactgtggcattcctgaatccattgagaatggtaaagttgaagacccagagagcactttgtttggttctgtcatccgctacacttgtgaggagccatattactacatggaaaatggaggaggtggtaggtttcttctactggagaagagagagagagagtgagaaggtgttggagggtggatagcataatctgtgccagagacagagtttggagacaaatgaaggcgataggacagacattgttcatccccttggcttcgtccaaagatacagttttcatctggagcagggcaagttcaggggagcatcagcctcagggaatcatagaggtcaccaactgagttcacagctgcagcaggaattcccctacaacatccatttcatgggattacccaccttttgaccagttatttcatgtaaaacccacaggagcaatgccttcagctttaagccaccaaactacactgactggctttcttgatgtagaggctttggtcatgctaggtgcagggctgaatgagaccctaatacgttctctgcattgctctgtatttatttcgccactttcccgatgccttctttccttctgctttggagatgttccctttgtctccctggcaggctagaggcctgagggattgtttggaggaagatattttttttctggctgatttaatctgatttactacttgaatcctagacgagctgaggttctgaaggaacggggcagggtgttggggtcggaggggggaatggaagaaggaagatgtggtggtgagtgtggcctgtgttctctgtgctattccaggggagtatcactgtgctggtaacgggagctgggtgaatgaggtgctgggcccggagctgccgaaatgtgttccaggtaaggagggctgaggcttggggagagatgatagccatgggtgactgggagtcaccttctgaaagcaactgtaatcctcttgggaaaggactgaacagtgacctgccagagtccagctcagtgaggtggcagtatcactgtgccgtgggctgccagggccgtggggaacctcctcagccgcactgaagccaggccaactggaaggaaatagaaacgtcagccagcgacagttggtgtctggtaatgtagctgcagtgagaagatacagaactgctaaaaacagggcctgaaagctgagagtgtgtgagtaatcaacactcagaaacaagtctagctaaatagcctagttattatattaaaagtttatagggcagcaagatatagaggaattcaaagaatgaggaagataagagttgggtagcagaaggctgaggcaaatccaataggataataaccatcctgggtggtactgaaagctgaagactgagctgatttgttgcatttattatctcattcgtgtccgtataacagccctgtgagctaggtgtcattggtcttatctgaccaatgtcaaatgtgaatgggtggggtgcaagttcacagagttagcaagtggcaaaggcaggctttgagcccaggtctgtctaagttcacagcccattgtgctcaacttggagtccctccaggctgtctagtaagggatttaagtaagcagcttcacttgaattcagttattagtataactgaatggtaatggcaccagtcactgggagtgagaggtcagggccaaagaagggacccctctctacttcctaggctgacctgtggtttactaggagggactcaggtgcaactaggactccagtaaagaaggtgattaaagtttgatctgggcatctgaagaaggcagaaatctttcctcctccaccatctgtgtgagaaaagggtttccagcactggctcttgattgggcaccggcctcatgtgccgagttgggaggtgcaaaggggacccctgcctccaggggggctgtgggtcgcactgtggatagtgtgaggcattagtgcatctggactcagtgattcacacactgcctccgtttaactgagctctcccatgagccagcttatgacatcggcaaagcgggatgtttaggtaaggccagagtgggtcaggtattgagattgttgaccaaatagggttgactattttgtactagagaatcctgcaacctagcaggtaacattatgtgagtggttggaggatttgcaggaagccagcatcatttcttcctccttccctgtgttgttttattccttcctagtctgtggagtccccagagaaccctttgaagaaaaacagaggataattggaggatccgatgcagatattaaaaacttcccctggcaagtcttctttgacaacccatgggctggtggagcgctcattaatgagtactgggtgctgacggctgctcatgttgtggagggaaacagggagccaacaatgtatgttgggtccacctcagtgcagacctcacggctggcaaaatccaagatgctcactcctgagcatgtgtttattcatccgggatggaagctgctggaagtcccagaaggacgaaccaattttgataatgacattgcactggtgcggctgaaagacccagtgaaaatgggacccaccgtctctcccatctgcctaccaggcacctcttccgactacaacctcatggatggggacctgggactgatctcaggctggggccgaacagagaagagagatcgtgctgttcgcctcaaggcggcaaggttacctgtagctcctttaagaaaatgcaaagaagtgaaagtggagaaacccacagcagatgcagaggcctatgttttcactcctaacatgatctgtgctggaggagagaagggcatggatagctgtaaaggggacagtggtggggcctttgctgtacaggatcccaatgacaagaccaaattctacgcagctggcctggtgtcctgggggccccagtgtgggacctatgggctctacacacgggtaaagaactatgttgactggataatgaagactatgcaggaaaatagcaccccccgtgaggactaatccagatacatcccaccagcctctccaagggtggtgaccaatgcattaccttctgttccttatgatattctcattatttcatcatgactgaaagaagacacgagcgaatgatttaaatagaacttgattgttgagacgccttgctagaggtagagtttgatcatagaattgtgctggtcatacatttgtggtctgactccttggggtcctttccccggagtacctattgtagataacactatgggtggggcactcctttcttgcactattccacagggataccttaattctttgtttcctctttacctgttcaaaattccatttacttgatcattctcagtatccactgtctatgtacaataaaggatgtttataagcaaa
